(19) United States
(12) Patent Application Publication
(10) Pub. No.: US 2025/0228969 A1
(43) Pub. Date: Jul. 17, 2025

(54) GENE EDITING TO IMPROVE JOINT FUNCTION

(71) Applicant: ORTHOBIO THERAPEUTICS, INC., Vail, CO (US)

(72) Inventors: Peter J. Millet, Edwards, CO (US); Matthew J. Allen, Swaffham Bulbeck (GB); George Gentsch, Cambridge (GB)

(21) Appl. No.: 18/832,443

(22) PCT Filed: Jan. 26, 2023
(86) PCT No.: PCT/US2023/061407

§ 371 Date: Jul. 23, 2024

Related U.S. Application Data
(60) Provisional application No. 63/303,290, filed on Jan. 26, 2022.

(51) Int. Cl. A61K 48/00; C12N 9/22; C12N 15/11; C12N 15/86; C12N 15/88

(52) U.S. Cl. CPC A61K 48/005; A61K 48/0075; C12N 9/22; C12N 15/111; C12N 15/86; C12N 15/88; C12N 2310/20; C12N 2750/14143

(57) ABSTRACT

Provided herein are compositions and methods for ablating intracellular signaling through specific reactive oxygen species (ROS)-responsive effector proteins as means of treatment for various conditions of a pro-inflammatory character. In some aspects, the compositions and methods are to prevent the progression of osteoarthritis and other arthritides and to treat osteoarthritis and other arthritides in a mammalian joint.

### CROSS REFERENCE TO RELATED APPLICATIONS

[0001] This application claims priority to U.S. Provisional Patent Application No. 63/303,290, filed Jan. 26, 2022, the contents of which are hereby incorporated by reference herein, in their entireties, for all purposes.

### BACKGROUND OF THE INVENTION

[0002] Reactive oxygen species are naturally occurring molecules that are generated by various cellular processes. In most instances, these molecules are detected by cells and destroyed. See generally, Bayr, H. (2005). Reactive oxygen species. Critical Care Medicine, 33(12), S498-S501. However, in certain disease states, such as gout or arthritis, this typical cycle is disturbed locally, such that ROS detection in, for example, the diseased joint, leads to heightened inflammatory signaling, thereby contributing to or exacerbating the disease.

[0003] Though small molecule drugs, such as inhibitors, could be employed to target particular proteins that transduce signals between ROS and inflammation, the versatile cellular functions these factors play in cellular homeostasis make such systemic treatments unsuitable. Therefore, new, more targeted approaches are needed to address these factors' contribution to disease without disrupting their roles in healthy cells throughout an organism.

### BRIEF SUMMARY OF THE INVENTION

[0004] Provided herein are compositions and methods for silencing the intracellular signaling of downstream effectors of reactive oxygen species (ROS) in an animal in need thereof to treat a disease, illness or condition caused by aberrant or excessive activity of said effector. In some embodiments, ROS effector intracellular signaling is silenced by CRISPR editing of the gene encoding the effector protein.

### BRIEF DESCRIPTION OF THE DRAWINGS

[0005] The presently disclosed embodiments will be further explained with reference to the attached drawings. The drawings shown are not necessarily to scale, with emphasis instead generally being placed upon illustrating the principles of the presently disclosed embodiments.

[0006] FIG. 1 illustrates transcriptome analysis of canine monocytes treated with MSU crystals relative to PBS control, with upregulated genes shaded.

[0007] FIGS. 2A, 2B, 2C, 2D, 2E, 2F, 2G, 2H, 2I, 2J, 2K, 2L, 2M, 2N, 20, 2P, 2Q, 2R, 2S, 2T, 2U, 2V, 2W, 2X, 2Y, 2Z, 2A1, 2B1, 2C1, 2D1, 2E1, 2F1, 2G1, 2H1, 2I1, 2J1, 2K1, 2L1, 2M1, 2N1, 201, 2P1, 2Q1, 2R1, 2S1, 2T1, 2U1, 2V1, 2W1, 2X1, 2Y1, 2Z1, 2A2, 2B2, 2C2, 2D2, 2E2, 2F2, 2G2, 2H2, 212, 2J2, 2K2, 2L2, 2M2, 2N2, 202, 2P2, 2Q2, 2R2, 2S2, 2T2, 2U2, 2V2, 2W2, 2X2, 2Y2, 2Z2, 2A3, 2B3, 2C3, 2D3, 2E3, 2F3, 2G3, 2H3, 2I3, 2J3, 2K3, and 2L3 collectively illustrate example CRISPR/Cas9 crRNA sequences designed for editing genes associated with the production, blocking, or removal of reactive oxygen species (ROS), in accordance with some embodiments of the present disclosure. The crRNA sequences were generated using the CRISPick server available online at the URL portals.broadinstitute.org/gppx/crispick/public. The algorithm was run against build GRCh38 (NCBI RefSeq v.109.20210514) of the human genome, and the algorithm optimized for a CRISPR knock-out (CRISPRko) mechanism and SpyoCas9 enzyme. The example sequences listed in FIG. 2 are not intended to be limiting.

[0008] FIGS. 3A, 3B and 3C collectively illustrate example CRISPR/Cas9 crRNA sequences designed for editing genes associated with the production, blocking, or removal of reactive oxygen species (ROS), in accordance with some embodiments of the present disclosure, e.g., NOX4. The crRNA sequences were generated using the CRISPick server available online at the URL portals.broadinstitute.org/gppx/crispick/public. The algorithm was run against build GRCh38 (NCBI RefSeq v.109.20210514) of the human genome, and the algorithm optimized for a CRISPR knock-out (CRISPRko) mechanism (FIG. 3A), a CRISPRRa mechanism (FIG. 3B), and a CRISPRi mechanism (FIG. 3C), and SpyoCas9 enzyme. The example sequences listed in FIG. 3 are not intended to be limiting.

[0009] FIGS. 4A and 4B, 4C, and 4D collectively illustrate example CRISPR/Cas9 crRNA sequences designed for editing genes associated with the production, blocking, or removal of reactive oxygen species (ROS), in accordance with some embodiments of the present disclosure. e.g., NOX4. The crRNA sequences were generated using the CRISPick server available online at the URL portals.broadinstitute.org/gppx/crispick/public. The algorithm was run against build GRCh38 (NCBI RefSeq v.109.20210514) of the human genome, and the algorithm optimized for a CRISPR knock-out (CRISPRko) mechanism, and SpyoCas9 enzyme (FIG. 4A), SaurCas9 enzyme (FIG. 4B), AsCas12 enzyme (FIG. 4C), and enAsCas12a enzyme (FIG. 4D). The example sequences listed in FIG. 4 are not intended to be limiting.

[0010] FIGS. 5A, 5B, 5C, 5D, 5E, 5F, 5G, 5H, 5I, 5J, 5K, 5L, 5M, and 5N illustrate SEQ ID NOs: 1-328 (A-G) the crRNA sequences generated by the bioinformatic methods herein described that target human NFKB1 to generate a genetic knockout and (H-N) additional information regarding the genomic coordinates of the bound DNA, DNA strand targeted, exon targeted, and several quality control parameters.

[0011] FIGS. 6A, 6B, 6C, 6D, 6E, 6F, 6G, 6H, 6I, 6J, 6K, 6L, 6M, 6N, 60, 6P, 6Q, and 6R collectively illustrate SEQ ID NOs: 329-680 and 5323-5410 (A-I) the crRNA sequences generated by the bioinformatic methods herein described that target human NFKB2 to generate a genetic knockout and (J-R) additional information regarding the genomic coordinates of the bound DNA, DNA strand targeted, exon targeted, and several quality control parameters.

### DETAILED DESCRIPTION OF THE INVENTION

### I. Introduction

[0012] Provided herein are compositions and methods for silencing the signaling functionality of one or more cellular receptors in an animal in need thereof to treat a disease, illness or condition caused by aberrant or excessive signaling through said receptor.

TABLE 1
Exemplary list of ROS effectors to be targeted

6-phosphogluconate dehydrogenase (6PGD)
Alcohol dehydrogenase (ADH)
Aldehyde dehydrogenase (ALDH2)
AP-1
B-cell lymphoma-extra large (Bcl-XL)
BCL2 apoptosis regulator (Bcl-2)
Bcl-2-associated X protein (BAX)
Catalase (CAT)
C-Jun N-terminal kinase (JNK)
Coenzyme Q10 (CoQ10)
CYP2E1
Cytochrome c (Cyt c)
F1Fo-ATP synthase
Ferritin heavy chain (FHC)
Glucose-6-phosphate dehydrogenase (G6PD)
Glutamylcysteine synthetase (GCS)
Glutathione (GSH) synthase
Glutathione Peroxidase 1 (GPX1)
Glutathione Peroxidase 2 (GPX2)
Glutathione Peroxidase 3 (GPX3)
Glutathione Peroxidase 4 (GPX4)
Glutathione Peroxidase 5 (GPX5)
Glutathione Peroxidase 6 (GPX6)
Glutathione Peroxidase 7 (GPX7)
Glutathione Peroxidase 8 (GPX8)
Glutathione reductase (GR)
Glycerol 3-phosphate dehydrogenase
Growth arrest and DNA damage (GADD 45)
Hypoxia-inducible factor 1-alpha (HIF-1α)
Mitogen-activated protein kinase (MAPK)
NADH-ubiquinone oxidoreductase
NADPH oxidase 4 (NOX4)
NADPH oxidase 5 (NOX5)
Nuclear factor kappa-light-chain-enhancer of activated B cells (NF-κB)
Nuclear factor κB (NF-κB) essential modulator (NEMO)
p46Shc (SHC isoform)
p52Shc (SHC isoform)
p53 upregulated modulator of apoptosis (PUMA)
p66Shc (SHC isoform)
Phosphoinositide 3-kinase (PI3-K)
Proline oxidase (PIG6, POX)
Quinone oxidoreductase (PIG3, NQO1)
Respiratory complexes I
Respiratory complexes II
Respiratory complexes III
Respiratory complexes IV
Sestrin 1 (SESN1)
Sestrin 2 (SESN2)
SHC adaptor protein 1 (SHC1)
Superoxide dismutase 1 (SOD1)
Superoxide dismutase 2 (SOD2)
Superoxide dismutase 3 (SOD3)
TNF alpha induced protein 3 (TNFAIP3)
Tumor protein 53 (p53)
Tumor protein p53 inducible nuclear protein 1 (TP53INP1)
Ubiquinol-cytochrome c oxidoreductase
2B4
ABCA1
ACP5
ADAR-1
ADSS
AIG1
AIM2
APOBEC3
ARRB2
B2M
BCAS3
BMP4
C10orf32
C21orf33
CASP1
CCL5
CD160
Cd53
CDKN2A
CHEK1
CNNM2
CNTNAP2
CSMD1
CTLA-4
CTSB
C-type lectin receptors CLRs
CXCL10
CYP17A1
DDX60
DYNC1I1
FOXO3a
GPC6
GRN
HCK
HECW1
HLA
IFI30
IFI44L
IFI6
IFITM
IFITM1/3
IFITM2
IFITM3
IL-18
IL-1α
IL-1β
interferon-γ
interleukin-12 (IL-12)
IRF
IRF-1
IRF3
IRF7
LAG-3
LIPC
MDA5/IFIH1
MPAK
MYH9
MYO16
MYO5A
NAIP
NF-κB
NLRC4
NLRP3
NOD2
NPL
NR
nucleotide oligomerization and binding domain NOD-like receptors
OAS1
OAS2
OASL
parkin gene (PARK2)
PD-1
PLEKHG1
PRKCA
PTBP1
PYCARD
Pyrin-HIN (PYHIN) domain containing receptors (e.g. AIM2)
reactive oxygen species (ROS)
retinoic acid inducible gene-I (RIG-I)-like receptors (RLRs)
RFC3
RGS1
RIG-I/DDX58
SAMHD1
SF3A1/SF3B1
SFXN2
SLAMF7
SLC41A1
SLC8A1
SLCO3A1
STAT1
Tetherin
TLR5
TLR7
TLR9
Toll-like receptors (TLRs)
TREM2
TREX1
TRIM5
TTLL7
TYROBP

[0013] In some embodiments, receptor signaling is silenced by CRISPR editing of the gene encoding the receptor. In some embodiments, the CRISPR editing results in ablation of a transmembrane domain (i.e., generation of a soluble decoy receptor). In some embodiments, the CRISPR editing results in ablation of a cytoplasmic domain (i.e., generation of a membrane-bound decoy receptor).

### II. Definitions

[0014] Unless defined otherwise, all technical and scientific terms used herein have the same meaning as is commonly understood by one of skill in the art to which this invention belongs. All patents and publications referred to herein are incorporated by reference in their entireties.

[0015] The terms “Nuclear Factor Kappa B Subunit 1” or “NFKB1” refer to the genes (NCBI Gene ID: 4790 [human], NCBI Gene ID: 442859 [canine], NCBI Gene ID: 100067894 [equine], NCBI Gene ID: 100142683 [feline]) or an encoded gene product (e.g., UniProt: P19838; NP_001158884.1 [human], XP_038299710.1 [canine], XP_005608646.3 [equine], XP_023108672.2 [feline]), as well as sequence variants, isoforms, proteins harboring conservative amino acid substitutions, and glycoforms thereof. Canonically, the proteins encoded by the genes listed above are a 105 kDa protein, a Rel protein-specific transcription inhibitor, which may undergo cotranslational processing by the 26S proteasome to produce a 50 kDa protein. This 50 kDa protein is a DNA binding subunit of the NF-kappa-B (NFKB) protein complex that is responsible for transcriptional regulation of various genes upon activation by any number of stimuli, including cytokines, oxidant-free radicals, ultraviolet irradiation, or detection of pathogenic molecular patterns. The activated NFKB heterodimer translocates into the nucleus to directly stimulate expression of genes involved in a wide variety of biological functions. Inappropriate activation of NFKB has been associated with a number of inflammatory diseases, while persistent inhibition of NFKB can lead to inappropriate immune cell development or delayed cell growth. In some instances, and merely for the sake of disambiguation, a prefix is added when referring to the protein or gene of a particular species (with h, c, e, and f, referring to the human, canine, equine, and feline forms, respectively).

[0016] In certain embodiments, any region of an NFKB1 gene (e.g., 5′ untranslated region [UTR], exon 1, exon 2, exon 3, exon 4, exon 5, exon 6, exon 7, exon 8, exon 9, exon 10, exon 11, exon 12, exon 13, exon 14, exon 15, exon 16, exon 17, exon 18, exon 19, exon 20, exon 21, exon 22, exon 23, exon 24, exon 25, exon 26, exon 27, exon 28, any intervening intronic regions, intron/exon junctions, the 3′ UTR, or polyadenylation signal) is targeted by an RNA-guided nuclease to alter the gene. In some embodiments, the NFKB1 gene targeted by an RNA-guided nuclease is from a mammal. In some embodiments, the NFKB1 gene targeted by an RNA-guided nuclease is from a human (hNFKB1). In some embodiments, the NFKB1 gene targeted by an RNA-guided nuclease is from a dog (cNFKB1). In some embodiments, the NFKB1 gene targeted by an RNA-guided nuclease is from a horse (eNFKB1). In some embodiments, the NFKB1 gene targeted by an RNA-guided nuclease is from a cat (fNFKB1).

[0017] The terms “Nuclear Factor Kappa B Subunit 2” or “NFKB2” refer to the genes (NCBI Gene ID: 4791 [human], NCBI Gene ID: 486858 [canine], NCBI Gene ID: 100069984 [equine], NCBI Gene ID: 101080578 [feline]) or an encoded gene product (e.g., UniProt: Q00653; NP_001070962.1 [human], XP_038296333.1 [canine], XP_001916453.3 [equine], XP_006938194.2 [feline]), as well as sequence variants, isoforms, proteins harboring conservative amino acid substitutions, and glycoforms thereof. Canonically, the proteins encoded by the genes listed above are co-translationally processed from a p100 full-length protein into a p52 active form. This p52 protein can act as a transcriptional repressor (as a homodimer) or a transcriptional activator (as part of the heterodimeric RelB-p52 complex). The activator complex is responsible for transcriptional regulation of various genes upon activation by any number of stimuli, including cytokines, oxidant-free radicals, ultraviolet irradiation, or detection of pathogenic molecular patterns, stimulating expression of genes involved in a wide variety of biological functions. Inappropriate activation of NFKB pathways has been associated with a number of inflammatory diseases, while persistent inhibition of NFKB can lead to inappropriate immune cell development or delayed cell growth. In some instances, and merely for the sake of disambiguation, a prefix is added when referring to the protein or gene of a particular species (with h, c, e, and f, referring to the human, canine, equine, and feline forms, respectively).

[0018] In certain embodiments, any region of an NFKB2 gene (e.g., 5′ untranslated region [UTR], exon 1, exon 2, exon 3, exon 4, exon 5, exon 6, exon 7, exon 8, exon 9, exon 10, exon 11, exon 12, exon 13, exon 14, exon 15, exon 16, exon 17, exon 18, exon 19, exon 20, exon 21, exon 22, exon 23, exon 24, any intervening intronic regions, intron/exon junctions, the 3′ UTR, or polyadenylation signal) is targeted by an RNA-guided nuclease to alter the gene. In some embodiments, the NFKB2 gene targeted by an RNA-guided nuclease is from a mammal. In some embodiments, the NFKB2 gene targeted by an RNA-guided nuclease is from a human (hNFKB2). In some embodiments, the NFKB2 gene targeted by an RNA-guided nuclease is from a dog (cNFKB2). In some embodiments, the NFKB2 gene targeted by an RNA-guided nuclease is from a horse (eNFKB2). In some embodiments, the NFKB2 gene targeted by an RNA-guided nuclease is from a cat (fNFKB2).

[0019] The term “reactive oxygen species” or “ROS” refers to any number of naturally-occurring unstable molecules that contain oxygen and that easily react with other molecules in a cell, often due to the presence of one or more unpaired electron. See generally, Bayr, H. (2005). Reactive oxygen species. Critical Care Medicine, 33(12), 5498-5501. Non-exhaustive examples include superoxide and its reduced oxygen derivatives and peroxynitrite.

[0020] The term “treatment” refers to obtaining a desired pharmacologic and/or physiologic effect. The effect may be prophylactic in terms of completely or partially preventing a disease or symptom thereof and/or may be therapeutic in terms of a partial or complete cure for a disease and/or adverse effect attributable to the disease. For example, a composition, method, or system of the present disclosure may be administered as a prophylactic treatment to a subject that has a predisposition for a given condition (e.g., arthritis). “Treatment”, as used herein, covers any treatment of a disease in a mammal, particularly in a human, canine, feline, or equine, and includes: (a) preventing the disease from occurring in a subject which may be predisposed to the disease but has not yet been diagnosed as having it; (b) inhibiting the disease, i.e., arresting its development or progression; and (c) relieving the disease, i.e., causing regression of the disease and/or relieving one or more disease symptoms.

[0021] “Treatment” is also meant to encompass delivery of an agent in order to provide for a pharmacologic effect, even in the absence of a disease or condition. For example, “treatment” encompasses delivery of a composition that can elicit an immune response or confer immunity in the absence of a disease condition, e.g., in the case of a vaccine. It is understood that compositions and methods of the present disclosure are applicable to treat all mammals, including, but not limited to human, canine, feline, equine, and bovine subjects.

[0022] The term “therapeutically effective” refers to the amount of a composition or combination of compositions as described herein that is sufficient to effect the intended application including, but not limited to, disease treatment. A therapeutically effective amount may vary depending upon the intended application (in vitro or in vivo), or the subject and disease condition being treated (e.g., the weight, age and gender of the subject), the severity of the disease condition, or the manner of administration. The term also applies to a dose that will induce a particular response in target cells (e.g., the reduction of platelet adhesion and/or cell migration). The specific dose will vary depending on the particular composition(s) chosen, the dosing regimen to be followed, whether the composition is administered in combination with other compositions or compounds, timing of administration, the tissue to which it is administered, and the physical delivery system in which the composition is carried.

[0023] The term “joint disease” is defined as measurable abnormalities in the cells or tissues of the joint that could lead to illness, for example, metabolic and molecular derangements triggering anatomical and/or physiological changes in the joint. Including, but not limited to, radiographic detection of joint space narrowing, subchondral sclerosis, subchondral cysts, and osteophyte formation.

[0024] “Joint illness” is defined in human subjects as symptoms that drive the subject to seek medical intervention, for example, subject reported pain, stiffness, swelling, or immobility. For non-human mammals, “joint illness” is defined, for example, as lameness, observable changes in gait, weight bearing, allodynia, or exploratory behavior.

[0025] The terms “polynucleotide,” “nucleotide,” and “nucleic acid” are used interchangeably herein to refer to all forms of nucleic acid, oligonucleotides, including deoxyribonucleic acid (DNA) and ribonucleic acid (RNA). Polynucleotides include genomic DNA, cDNA and antisense DNA, and spliced or unspliced mRNA, rRNA, tRNA, lncRNA, RNA antagomirs, and inhibitory DNA or RNA (RNAi, e.g., small or short hairpin (sh)RNA, microRNA (miRNA), aptamers, small or short interfering (si)RNA, trans-splicing RNA, or antisense RNA). Polynucleotides also include non-coding RNA, which include for example, but are not limited to, RNAi, miRNAs, lncRNAs, RNA antagomirs, aptamers, and any other non-coding RNAs known to those of skill in the art. Polynucleotides include naturally occurring, synthetic, and intentionally altered or modified polynucleotides as well as analogues and derivatives. The term “polynucleotide” also refers to a polymeric form of nucleotides of any length, including deoxyribonucleotides or ribonucleotides, or analogs thereof, and is synonymous with nucleic acid sequence. A polynucleotide may comprise modified nucleotides, such as methylated nucleotides and nucleotide analogs, and may be interrupted by non-nucleotide components. If present, modifications to the nucleotide structure may be imparted before or after assembly of the polymer. The term polynucleotide, as used herein, refers interchangeably to double- and single-stranded molecules. Unless otherwise specified or required, any embodiment as described herein encompassing a polynucleotide encompasses both the double-stranded form and each of two complementary single-stranded forms known or predicted to make up the double-stranded form. Polynucleotides can be single, double, or triplex, linear or circular, and can be of any length. In discussing polynucleotides, a sequence or structure of a particular polynucleotide may be described herein according to the convention of providing the sequence in the 5′ to 3′ direction.

[0026] The term “gene” or “nucleotide sequence encoding a polypeptide” refers to the segment of DNA involved in producing a polypeptide chain. The DNA segment may include regions preceding and following the coding region (leader and trailer) involved in the transcription/translation of the gene product and the regulation of the transcription/translation, as well as intervening sequences (introns) between individual coding segments (exons). For example, a gene includes a polynucleotide containing at least one open reading frame capable of encoding a particular protein or polypeptide after being transcribed and translated.

[0027] The term “receptor” refers to a protein capable of binding another cognate protein (i.e., its ligand) with high affinity. This receptor-ligand interaction may be 1:1, or result in multimerization, wherein numerous proteins aggregate to bind one or more ligands. Receptors are generally present at the cell surface, such that they may most efficiently encounter a ligand and initiate intracellular signaling.

[0028] The term “intracellular signaling” refers to cellular changes that result due to events occurring at the cell surface. Typically, a soluble ligand binds its receptor at the cell surface, which can induce changes in the receptor, such that associated intracellular factors are also affected. These factors may then impact others within the cell, and this cascade continues until, in many cases, a particular factor is able to alter gene expression in the nucleus in response to the stimulus at the surface.

[0029] The term “RNA-guided nuclease” refers to an enzyme capable of breaking the backbone of, for example, a DNA molecule. The activity of RNA-guided nucleases is directed by a nucleic acid molecule (i.e., guide RNA). Once properly oriented to form a functional ribonucleoprotein complex, the enzyme locates a specific position within a target nucleic acid (e.g., a gene or locus) via sequence complementarity with a portion of the guide RNA. Non-exhaustive examples of RNA-guided nucleases include Cas9, Cas12 and Cas12a (previously known as Cpf1).

[0030] The term “Cas9” refers to an RNA-guided, double-stranded DNA-binding nuclease protein or nickase protein, or a variant thereof and may be used to refer to either naturally-occurring or recombinant Cas9 nucleases variants (e.g., ES-Cas9, HF-Cas9, PE-Cas9, and AR-Cas9). The wildtype Cas9 nuclease has two functional domains, e.g., RuvC and HNH, that simultaneously cut both strands of double stranded DNA, resulting in a double-strand break. Cas9 enzymes described herein may comprise a HNH or HNH-like nuclease domain and/or a RuvC or RuvC-like nuclease domain without impacts on the ability to induce double-strand breaks in genomic DNA (e.g., at a target locus) when both functional domains are active. The Cas9 enzyme may comprise one or more catalytic domains of a Cas9 protein derived from bacteria belonging to the group consisting of Corynebacteria, Sutterella, Legionella, Treponema, Filifactor, Eubacterium, Streptococcus, Lactobacillus, Mycoplasma, Bacteroides, Flaviivola, Flavobacterium, Sphaerochaeta, Azospirillum, Gluconacetobacter, Neisseria, Roseburia, Parvibaculum, Staphylococcus, Nitratifractor, and Campylobacter. In some embodiments, the two catalytic domains are derived from different bacteria species.

[0031] As used herein, “PAM” refers to a Protospacer Adjacent Motif and is necessary for an RNA-guided nuclease to bind a target nucleic acid. In many instances, the PAM directly abuts the complementary sequence in the target. Naturally-occurring Cas9, for example, molecules recognize specific PAM sequences (see, e.g., Table 2). In some embodiments, a Cas9 molecule has the same PAM specificities as a naturally occurring Cas9 molecule. In other embodiments, a Cas9 molecule has a PAM specificity not associated with a naturally occurring Cas9 molecule. In other embodiments, a Cas9 molecule's PAM specificity is not associated with the naturally occurring Cas9 molecule to which it has the closest sequence homology. For example, a naturally occurring Cas9 molecule can be altered such that the PAM sequence recognition is altered to decrease off target sites, improve specificity, or eliminate a PAM recognition requirement. In an embodiment, a Cas9 molecule may be altered (e.g., to lengthen a PAM recognition sequence, improve Cas9 specificity to high level of identity, to decrease off target sites, and/or increase specificity). In an embodiment, the length of the PAM recognition sequence is at least 4, 5, 6, 7, 8, 9, 10 or 15 amino acids in length. In some embodiments, a Cas9 molecule may be altered to ablate PAM recognition.

[0032] The terms “guide RNA,” “gRNA” or “sgRNA” may be used interchangeably and refer to an RNA molecule, preferably a synthetic RNA molecule, composed of a targeting (crRNA) sequence and scaffold. These molecules, once loaded onto a functional RNA-guided nuclease can direct sequence-specific cleavage of a target nucleic acid.

[0033] An sgRNA can be administered or formulated, e.g., as a synthetic RNA, or as a nucleic acid comprising a sequence encoding the gRNA, which is then expressed in the target cells. As would be evident to one of ordinary skill in the art, various tools may be used in the design and/or optimization of an sgRNA in order to, for example, increase specificity and/or precision of genomic editing at a particular site.

[0034] In general, candidate sgRNAs may be designed and identified by first locating suitable PAMs within a genomic sequence. Then additional calculations may be utilized to predict on-target and off-target efficiencies. Available web-based tools to aid in the initial design and modeling of candidate sgRNAs include, without limitation, CRISPRseek, CRISPR Design Tool, Cas-OFFinder, E-CRISP, ChopChop, CasOT, CRISPR direct, CRISPOR, BREAKING-CAS, CrispRGold, and CCTop. See, e.g., Safari, F. et al. (2017). Current Pharmaceutical Biotechnology, 18(13):1038-54, which is incorporated by reference herein in its entirety for all purposes. Such tools are also described, for example, in PCT Publication No. WO2014093701A1 and Liu, G. et al. (2020). Computational approaches for effective CRISPR guide RNA design and evaluation. Computational and Structural Biotechnology Journal, 18: 35-44, each of which is incorporated by reference herein in its entirety for all purposes. Candidate sgRNAs may be further assessed by experimental screening or other methodologies.

[0035] The terms “CRISPR RNA” or “crRNA” refer to the portion of an sgRNA molecule with complementarity to the target nucleic acid.

[0036] The phrase “pharmaceutically acceptable” refers to those compounds, materials, compositions, and/or dosage forms that are, within the scope of sound medical judgment, suitable for use in contact with the tissues of human beings and animals without excessive toxicity, irritation, allergic response, or other problems or complications commensurate with a reasonable benefit/risk ratio.

[0037] The terms “pharmaceutically acceptable carrier” or “pharmaceutically acceptable excipient” are intended to include any and all solvents, dispersion media, coatings, antibacterial and antifungal agents, isotonic and absorption delaying agents, and inert ingredients. The use of such pharmaceutically acceptable carriers or pharmaceutically acceptable excipients for active pharmaceutical ingredients is well known in the art. Except insofar as any conventional pharmaceutically acceptable carrier or pharmaceutically acceptable excipient is incompatible with the active pharmaceutical ingredient, its use in the therapeutic compositions of the disclosure is contemplated. Additional active pharmaceutical ingredients, such as other drugs, can also be incorporated into the described compositions and methods.

[0038] The term “pharmaceutically acceptable excipient” is intended to include vehicles and carriers capable of being co-administered with a compound to facilitate the performance of its intended function. The use of such media for pharmaceutically active substances is well known in the art. Examples of such vehicles and carriers include solutions, solvents, dispersion media, delay agents, emulsions and the like. Any other conventional carrier suitable for use with the multi-binding compounds also falls within the scope of the present disclosure.

[0039] As used herein, the term “a”, “an”, or “the” generally is construed to cover both the singular and the plural forms.

[0040] The terms “about” and “approximately” mean within a statistically meaningful range of a value. Such a range can be within an order of magnitude, preferably within 50%, more preferably within 20%, more preferably still within 10%, and even more preferably within 5% of a given value or range. The allowable variation encompassed by the terms “about” or “approximately” depends on the particular system under study, and can be readily appreciated by one of ordinary skill in the art. Moreover, as used herein, the terms “about” and “approximately” mean that compositions, amounts, formulations, parameters, shapes and other quantities and characteristics are not and need not be exact, but may be approximate and/or larger or smaller, as desired, reflecting tolerances, conversion factors, rounding off, measurement error and the like, and other factors known to those of skill in the art. In general, a dimension, size, formulation, parameter, shape or other quantity or characteristic is “about” or “approximate,” whether or not expressly stated to be such. It is noted that embodiments of very different sizes, shapes and dimensions may employ the described arrangements.

[0041] The term “substantially” as used herein can refer to a majority of, or mostly, as in at least about 50%, 60%, 70%, 80%, 90%, 95%, 96%, 97%, 98%, 99%, 99.5%, 99.9%, 99.99%, or at least about 99.999% or more.

[0042] The transitional terms “comprising,” “consisting essentially of,” and “consisting of,” when used in the appended claims, in original and amended form, define the claim scope with respect to what unrecited additional claim elements or steps, if any, are excluded from the scope of the claim(s). The term “comprising” is intended to be inclusive or open-ended and does not exclude any additional, unrecited element, method, step or material. The term “consisting of” excludes any element, step or material other than those specified in the claim and, in the latter instance, impurities ordinary associated with the specified material(s). The term “consisting essentially of” limits the scope of a claim to the specified elements, steps or material(s) and those that do not materially affect the basic and novel characteristic(s) of the claimed methods and compositions. All compositions, methods, and kits described herein that embody the present disclosure can, in alternate embodiments, be more specifically defined by any of the transitional terms “comprising,” “consisting essentially of,” and “consisting of.”

### III. Methods

### A. CRISPR

[0043] Unless otherwise defined, all technical and scientific terms used herein have the same meaning as commonly understood by one of ordinary skill in the art to which this disclosure belongs. Although methods and materials similar or equivalent to those described herein may be used in the practice or testing of the present disclosure, suitable methods and materials are described below. All publications, patent applications, patents, and other references mentioned herein are incorporated by reference in their entirety. In addition, the materials, methods, and examples are illustrative only and not intended to be limiting.

[0044] In one aspect, the present disclosure encompasses compositions relating to clustered regularly interspaced short palindromic repeats (CRISPR) and CRISPR-associated RNA-guided nucleases and associated methods, components, and compositions (hereafter, CRISPR/Cas systems). Such systems minimally require at least one isolated or non-naturally-occurring RNA-guided nuclease (e.g., a Cas9 protein) and at least one isolated or non-naturally-occurring guide RNA (e.g., an sgRNA) to effectuate augmentation of a nucleic acid sequence (e.g., genomic DNA).

[0045] In some embodiments, a CRISPR/Cas system effectuates the alteration of a targeted gene or locus in a eukaryotic cell by effecting an alteration of the sequence at a target position (e.g., by creating an insertion or deletion (collectively, an indel) resulting in loss-of-function of (i.e., knocking out) the affected gene or allele; e.g., a nucleotide substitution resulting in a truncation, nonsense mutation, or other type of loss-of-function of an encoded product of, for example, one or more NFKB1 or NFKB2 gene (i.e., mRNA or protein); a deletion of one or more nucleotides resulting in a truncation, nonsense mutation, or other type of loss-of-function of an encoded product of, for example, one or more NFKB1 or NFKB2 gene; e.g., loss-of-function of the encoded mRNA or protein by a single nucleotide, double nucleotide, or other frame-shifting deletion, or a deletion resulting in a premature stop codon; or an insertion resulting in a truncation, nonsense mutation, or other type of loss-of-function of an encoded gene product, such as an encoded gene product of, for example, one or more NFKB1 or NFKB2 gene (i.e., mRNA or protein); e.g., a single nucleotide, double nucleotide, or other frame-shifting insertions, or an insertion resulting in a premature stop codon. In some embodiments, a CRISPR/Cas system of the present disclosure provides for the alteration of a gene and/or encoded product of a gene, such that the altered product has a resultant loss-of-function and becomes a dominant negative or decoy (e.g., a transmembrane receptor incapable of initiating intracellular signaling or a soluble receptor).

[0046] In one aspect, CRISPR/Cas systems effectuate changes to the sequence of a nucleic acid through nuclease activity. For example, in the case of genomic DNA, the RNA-guided-nuclease locates a target position within a targeted gene or locus by sequence complementarity with the target genomic sequence (e.g., CRISPR RNA (crRNA) or a complementary component of a synthetic single guide RNA (sgRNA)) and cleaves the genomic DNA upon recognition of a particular, nuclease-specific motif called the protospacer adjacent motif (PAM). See generally, Collias, D., & Beisel, C. L. (2021). Nature Communications, 12(1), 1-12.

[0047] Nuclease activity (i.e., cleavage) induces a double-strand break (DSB) in the case of genomic DNA. Endogenous cellular mechanisms of DSB repair, namely non-homologous end joining (NHEJ), microhomology-mediated end joining (MMEJ), and homologous recombination, result in erroneous repair at a given target position with some calculable frequency as a result of interference from said components of the CRISPR/Cas system, thereby introducing substitutions or indels into the genomic DNA. See generally Scully, R., et al. (2019). Nature Reviews Molecular Cell Biology, 20(11), 698-714. At some frequency, these indels and/or substitutions may result in frameshifts, nonsense mutations (i.e., early stop codons) or truncations that impact the availability of gene products, such as mRNA and/or protein. In certain embodiments, the CRISPR/Cas system may induce a homology-directed repair (HDR) mechanism leading to insertions of non-random sequences at a target position through the use of templates (e.g., an HDR template) provided to the cell as part of the system along with the nuclease and gRNA. See Bloh, K., & Rivera-Torres, N. (2021). International Journal of Molecular Sciences, 22(8), 3834.

[0048] In general, the minimum requirements of the CRISPR/Cas system will be dependent upon the nuclease (i.e., Cas protein) provided therewith. To this extent, these bacterially-derived nucleases have been functionally divided into Types I, III, and V, which all fall into Class 1 and Types II, IV, and VI that are grouped into Class 2.

### Class 1 CRISPR Cas Systems:

[0049] The exact components, compositions, and methods for effectuating a change in a targeted nucleic acid sequence using a Class 1 CRISPR/Cas system will vary, but should minimally include: a nuclease (selected from at least Types I, and III), at least one guide RNA selected from 1) sgRNA or 2) a combination of crRNA and tracrRNA. These CRISPR/Cas systems have been categorized together as Class 1 CRISPR/Cas systems due to their similarities in requirements and mode of action within a eukaryotic cell. To this end, compositions, components, and methods among Class 1 constituents may be considered functionally interchangeable, and the following details, provided merely for exemplary purposes, do not represent an exhaustive list of class members:

[0050] Cas3 (see Table 2) is the prototypical Type I DNA nuclease that functions as the effector protein as part of a larger complex (the Cascade complex comprising Cse1, Cse2), that is capable of genome editing. See generally He, L., et al. (2020). Genes, 11(2), 208. Unlike other CRISPR/Cas systems, Type I systems localize to the DNA target without the Cas3 nuclease via the Cascade complex, which then recruits Cas3 to cleave DNA upon binding and locating the 3′ PAM. The Cascade complex is also responsible for processing crRNAs such that they can be used to guide it to the target position. Because of this functionality, Cascade has the ability to process multiple arrayed crRNAs from a single molecule. See. Luo, M. (2015). Nucleic Acids Research, 43(1), 674-681. As such, Type I system may be used to edit multiple targeted genes or loci from a single molecule.

[0051] Because the natural Cas3 substrate is ssDNA, its function in genomic editing is thought to be as a nickase; however, when targeted in tandem, the resulting edit is a result of blunt end cuts to opposing strands to approximate a blunt-cutting endonuclease, such as Cas9. See Pickar-Oliver, A., & Gersbach, C. A. (2019). Nature Reviews Molecular Cell Biology, 20(8), 490-507.

[0052] Like Type I nucleases, the Type III system relies upon a complex of proteins to effect nucleic acid cleavage. Particularly, Cas10 possesses the nuclease activity to cleave ssDNA in prokaryotes. See Tamulaitis, G. Trends in Microbiology, 25(1), 49-61 (2017). Interestingly, this CRISPR/Cas system, native to archaea, exhibits dual specificity and targets both ssDNA and ssRNA. Aside from this change, the system functions much like Type I in that the crRNA targets an effector complex (similar to Cascade) in a sequence-dependent manner. Similarly, the effector complex processes crRNAs prior to association. The dual nature of this nuclease makes its applications to genomic editing potentially more powerful, as both genomic DNA and, in some cases, mRNAs with the same sequence may be targeted to silence particular targeted genes.

### Class 2 CRISPR Cas Systems:

[0053] The exact components, compositions, and methods for effectuating a change in a targeted nucleic acid sequence using a Class 2 CRISPR/Cas system will vary but should minimally include: a nuclease (selected from at least Types II, and V), at least one guide RNA selected from 1) sgRNA or 2) a combination of crRNA and tracrRNA. These CRISPR/Cas systems have been categorized together as Class 2 CRISPR/Cas systems due to their similarities in requirements and mode of action within a eukaryotic cell. To this end, compositions, components, and methods among Class 2 constituents may be considered functionally interchangeable, and the following details, provided merely for exemplary purposes, do not represent an exhaustive list of class members:

[0054] Type II nucleases are the best-characterized CRISPR/Cas systems, particularly the canonical genomic editing nuclease Cas9 (see Table 2). Multiple Cas9 proteins, derived from various bacterial species, have been isolated. The primary distinction between these nucleases is the PAM, a required recognition site within the targeted dsDNA. After association with a gRNA molecule, the crRNA (or targeting domain of a sgRNA) orients the nuclease at the proper position, but the protein's recognition of the PAM is what induces a cleavage event near that site, resulting in a blunt DSB.

[0055] In addition to the naturally-derived Cas9 proteins, several engineered variants have similarly been reported. These range from Cas9 with enhanced specific (i.e., less off-target activity), such as espCas9. Others have been catalytically modified via point mutations in the RuvC (e.g., D10A) and HNH (e.g., H840A) domains such that they induce only single-strand breaks (i.e., Cas9 nickases). See Frock, R. et al. (2015). Nature Biotechnology, 33(2), 179-186. These have also been shown to be less error-prone in editing. Such mitigation of off-target effects becomes paramount when selecting for a desired insertion (i.e., a knock in mutation, in which a desired nucleotide sequence is introduced into a target nucleic acid molecule) rather than a deletion. Indeed, less off-target effects may aid in the preferred DNA repair mechanism (HDR, in most instances for knock in mutations). See generally Naeem, M., et al. (2020). Cells, 9(7), 1608.

[0056] Additional exemplary further engineered variants of canonical Cas proteins (e.g., mutants, chimeras, and include the following (each of which are hereby incorporated by reference in their entireties for all purposes): WO2015035162A2, WO2019126716A1, WO2019126774A1, WO2014093694A1, WO2014150624A1, US20190225955A1, U.S. patent Ser. No. 11/427,818, U.S. patent Ser. No. 11/242,542, U.S. patent Ser. No. 11/098,297, U.S. patent Ser. No. 10/876,100, U.S. patent Ser. No. 10/767,193, U.S. patent Ser. No. 10/494,621, and U.S. patent Ser. No. 10/100,291.

[0057] For the avoidance of doubt, SpCas9 collectively refers to any one of the group consisting of espCas9 (also referred to herein as ES-Cas9 or esCas9), HF-Cas9, PE-Cas9, ARCas9 (also referred to as AR-Cas9).

[0058] Like the canonical Cas9 systems, Type V nucleases only require a synthetic sgRNA with a targeting domain complementary to a genomic sequence to carry out genomic editing. These nucleases contain a RuvC domain but lack the HNH domain of Type II nucleases. Further, Cas12, for example, leaves a staggered cut in the dsDNA substrate distal to the PAM, as compared to Cas9's blunt cut next to the PAM. Both Cas12a, also known as Cpf1, and Cas12b, also known as C2c1 (see Table 2), act as part of larger complex of two gRNA-associated nucleases that acts on dsDNA as a quaternary structure, nicking each strand simultaneously. See Zetsche, B. et al. (2015). Cell, 163(3):759-771; see also Liu, L. et al. (2017). Molecular Cell, 65(2):310-322. Additionally, Cas12b (C2c1) is a highly accurate nuclease with little tolerance for mismatches. See Yang, H. et al. (2016). Cell, 167(7):1814-1828.e12.

TABLE 2
Exemplary list of Cas nucleases and their requirements

| | | Type of end | |
|---|---|---|---|
| | | generated | Spacer |
| | PAM | (nucleic acid | length |
| Nuclease (Species) | (5′→3′) | target) | (nt) |
| Cas9 (S. pyogenes) | NGG | Blunt (dsDNA) | 20 |
| Cas9 (S. aureus) | NNGRRT | Blunt (dsDNA) | 20 |
| Cas9 (C. jejuni) | NNNNRYAC | Blunt (dsDNA) | 22 |
| Cas9 (S. thermophilus) | NNAGAAW | Blunt (dsDNA) | 20 |
| Cas9 (N. meningitidis) | NNNNGATT | Blunt (dsDNA) | 24 |
| Cas9 (F. novicida) | NGG | Blunt (dsDNA) | 21 |
| Cas12a (L. bacterium) | TTTV | 5′ staggered | 23-25 |
| | | (dsDNA/ssDNA) | |
| Cas12a | TTTN | 5′ staggered | 24 |
| (Acidaminococcus sp.) | | (dsDNA/ssDNA) | |
| Cas3 (E. coli) | CTT/ | None/blunt | 32 |
| | CCT/ | (ssDNA) | |
| | CAT/ | | |
| | CTC | | |

See generally Wang, J., Zhang, C., & Feng, B. (2020). Journal of Cellular and Molecular Medicine, 24(6), 3256-3270, where N = any nucleotide; R = any purine (A or G); Y = any pyrimidine (C or T); W = A or T ; V = A, C or G.

[0059] In one aspect, the CRISPR/Cas system of the present disclosure comprises at least one RNA-guided nuclease (e.g. a Cas protein) derived from one or more of the following selected bacterial genera: Corynebacterium, Sutterella, Legionella, Treponema, Filifactor, Eubacterium, Streptococcus, Lactobacillus, Mycoplasma, Bacteroides, Flavobacterium, Spirochaeta, Azospirillum, Gluconacetobacter, Neisseria, Roseburia, Parvibaculum, Nitratifractor, Campylobacter, Pseudomonas, Streptomyces, Staphylococcus, Francisella, Acidaminococcus, Lachnospiraceae, Leptotrichia, and Prevotella. In some embodiments, the Cas protein is derived from Deltaproteobacteria or Planctomycetes bacterial species.

[0060] Some aspects of the present disclosure provide strategies, methods, compositions, and treatment modalities for altering a targeted sequence within a gene locus (e.g., altering the sequence of wild type and/or of a mutant sequence within a cell or within a mammal) by insertion or deletion of one or more nucleotides mediated by an RNA-guided nuclease and one or more guide RNAs (gRNAs), resulting in loss of function of the targeted gene product. In some embodiments, the loss of function results in “knocking out” the gene of interest (i.e., generation of a “knock out”) by ablating gene expression. In some embodiments, the loss function results in a non-functional gene product (i.e., a gene product without all functionality of the wildtype gene product). In some embodiments, the loss of function results in expression of gene product with different characteristics (e.g., different binding affinity or different cellular localization).

[0061] In certain embodiments, the targeted gene is selected from NFKB1, NFKB2, and combinations thereof. In some embodiments, any region of the targeted gene (e.g., a promoter region, a 5′ untranslated region, a 3′ untranslated region, an exon, an intron, or an exon/intron border) is targeted by an RNA-guided nuclease to alter the gene. In some embodiments, a non-coding region of the targeted gene (e.g., an enhancer region, a promoter region, an intron, 5′ UTR, 3′ UTR, polyadenylation signal) is targeted to alter the gene.

### CRISPR Guide RNAs:

[0062] In one aspect, the CRISPR/Cas system of the present disclosure further provides a gRNA molecule (e.g., an isolated or non-naturally occurring RNA molecule) that interacts with the RNA-guided nuclease. In certain embodiments, the gRNA is an sgRNA comprising a crRNA sequence comprising a nucleotide sequence which is complementary to a sequence in a target nucleic acid. In some embodiments, the sgRNA further comprises an RNA scaffolding portion (i.e. tracrRNA) that interacts with the RNA-guided nuclease, such that the crRNA is positioned to scan a target nucleic acid for complementarity. In some embodiments, the system is further, optionally, comprised of an oligonucleotide—an HDR template with homology to either side of the target position. See Bloh, K., & Rivera-Torres, N. (2021). International Journal of Molecular Sciences, 22(8):3834.

[0063] In an embodiment, the RNA-guided nuclease and sgRNA are configured to orient an associated nuclease such that a cleavage event, (e.g., a double strand break or a single strand break) occurs sufficiently close to a complementary sequence in the targeted nucleic acid, thereby facilitating an alteration in the nucleic acid sequence. In some embodiments, the crRNA is 20 nucleotides in length. In some embodiments, the crRNA is 14, 15, 16, 17, 18, 19, 20, 21, 22, 23, 24, 25, 26, 27, 28, 29, or 30 nucleotides in length.

[0064] In some embodiments, the crRNA orients the RNA-guided nuclease such that a cleavage event occurs within 1, 2, 3, 4, 5, 10, 15, 20, 25, 30, 35, 40, 45, 50, 55, 60, 65, 70, 75, 80, 85, 90, 95, 100, 125, 150, 175, or 200 nucleotides away from the complementary sequence in the targeted nucleic acid. The double- or single-strand break may be positioned upstream or downstream of the complementary sequence in the targeted nucleic acid. In some embodiments, the cleavage event occurs within a targeted gene. In some embodiments, the cleavage event occurs upstream of a targeted gene.

[0065] In certain embodiments, a second gRNA molecule, comprising a second crRNA orients a second RNA-guided nuclease, such that a cleavage event occurs sufficiently close to a complementary sequence in the targeted nucleic acid, thereby facilitating an alteration in the nucleic acid sequence. In some embodiments, the first gRNA and the second gRNA promote a cleavage event within a single targeted gene. In some embodiments, the first gRNA and the second gRNA promote a cleavage event within different targeted genes. In some embodiments, the second crRNA is 20 nucleotides in length. In some embodiments, the second crRNA is 14, 15, 16, 17, 18, 19, 20, 21, 22, 23, 24, 25, 26, 27, 28, 29, or 30 nucleotides in length.

[0066] In some embodiments, the second crRNA orients the RNA-guided nuclease such that a cleavage event occurs within 1, 2, 3, 4, 5, 10, 15, 20, 25, 30, 35, 40, 45, 50, 55, 60, 65, 70, 75, 80, 85, 90, 95, 100, 125, 150, 175, or 200 nucleotides away from the complementary sequence in the targeted nucleic acid. The double- or single-strand break may be positioned upstream or downstream of the complementary sequence in the targeted nucleic acid. In some embodiments, the cleavage event occurs within a targeted gene. In some embodiments, the cleavage event occurs upstream of a targeted gene.

[0067] In some embodiments, the targeting domains of the first gRNA and the second gRNA are configured such that a cleavage event is positioned, independently for each of the gRNA molecules, within 1, 2, 3, 4, 5, 10, 15, 20, 25, 30, 35, 40, 45, 50, 55, 60, 65, 70, 75, 80, 85, 90, 95, 100, 125, 150, 175, or 200 nucleotides of the others cleavage event. In some embodiments, the first gRNA and the second gRNA molecules alter the targeted nucleic acid sequences simultaneously. In some embodiments, the first gRNA and the second gRNA molecules alter the targeted nucleic acid sequences sequentially.

[0068] In some embodiments, a single-strand break is accompanied by a second single-strand break, positioned by the crRNA of a first gRNA and a second gRNA, respectively. For example, the crRNA may orient the associated RNA-guided nucleases such that a cleavage event, (e.g., the two single-strand breaks), are positioned within 1, 2, 3, 4, 5, 10, 15, 20, 25, 30, 35, 40, 45, 50, 55, 60, 65, 70, 75, 80, 85, 90, 95, 100, 125, 150, 175, or 200 nucleotides of one another. In some embodiments, a first crRNA and a second crRNA are configured to orient associated RNA-guided nucleases such that, for example, two single-strand breaks occurs at the same position, or within 1, 2, 3, 4, 5, 10, 15, 20, 25, 30, 35, 40, 45, 50 nucleotides of one another, on opposing strands of genomic DNA, thereby essentially approximating a double strand break.

[0069] In some embodiments, the nucleic acid encoding one or more crRNAs is selected from any of SEQ ID NOs: 5323-6090. In some embodiments, the nucleic acid encoding one or more crRNAs target hNFKB1 and is selected from any of SEQ ID NOs: 5323-5650.

[0070] In some embodiments, the nucleic acid encoding one or more crRNAs is selected from any of SEQ ID NOs: 5323-6090. In some embodiments, the nucleic acid encoding one or more crRNAs target hNFKB2 and is selected from any of SEQ ID NOs: 5651-6090.

[0071] In some embodiments a nucleic acid encodes a second sgRNA molecule. In some embodiments, a nucleic acid encodes a third sgRNA molecule. In some embodiments, a nucleic acid encodes a fourth sgRNA molecule.

[0072] In certain embodiments, a nucleic acid may comprise (a) a sequence encoding a first sgRNA, comprising a crRNA that is complementary with a sequence in a targeted gene, (b) a sequence encoding a second sgRNA, comprising a crRNA that is complementary with a sequence in a second targeted gene, and (c) a sequence encoding an RNA-guided nuclease (e.g., Cas9). Optionally, (d) and (e) are sequences encoding a third sgRNA and a fourth sgRNA, respectively. In some embodiments, the second targeted gene is the same as the first targeted gene. In other embodiments, the second targeted gene is different from the first targeted gene. In some embodiments, (a), (b), and (c) are encoded within the same nucleic acid molecule (e.g., the same vector). In some embodiments, (a) and (b) are encoded within the same nucleic acid molecule. In some embodiments, (a), (b) and (d) are encoded within the same nucleic acid molecule. In some embodiments, (a), (b) and (e) are encoded within the same nucleic acid molecule. In some embodiments, (a), (b), (d) and (e) are encoded within the same nucleic acid molecule. In some embodiments, (a), (b), and (c) are encoded within separate nucleic acid molecules. When more than two sgRNAs are used, any combination of (a), (b), (c), (d) and (e) may be encoded within a single or separate nucleic acid molecules.

[0073] In one aspect, the nucleic acid molecules (i.e., those encoding (a), (b), (c), (d) or (e)) are delivered to a target cell (i.e., any combination of the encoded RNA-guided nuclease of (c) and at least one encoded gRNA molecule of (a), (b), (d), or (e) contact a target cell). In some embodiments, said nucleic acid molecules are delivered to a target cell in vivo. In other embodiments, said nucleic acid molecules are delivered to a target cell ex vivo. In some embodiments, said nucleic acid molecules are delivered to a target cell in vitro. In certain embodiments, said nucleic acid molecules are delivered to a target cell as DNA. In other embodiments, said nucleic acid molecules are delivered to a target cell as RNA (e.g., mRNA). In some embodiments, the products of said nucleic acid molecules are delivered as an assembled ribonucleoprotein (RNP).

[0074] In some embodiments, contacting a target cell comprises delivering said RNA-guided nuclease of (c), as a protein with at least one said nucleic acid molecules selected from (a), (b), (d), and (e). In some embodiments, contacting a target cell comprises delivering said encoded RNA-guided nuclease of (c), as DNA with at least one said nucleic acid molecules selected from (a), (b), (d), and (e). In some embodiments, contacting a target cell comprises delivering said encoded RNA-guided nuclease of (c), as mRNA with at least one said nucleic acid molecules selected from (a), (b), (d), and (e).

[0075] In certain embodiments, CRISPR components are delivered to a target cell via nanoparticles. Exemplary nanoparticles that may be used with all CRISPR/Cas systems disclosed herein include, at least, lipid nanoparticles or liposomes, hydrogel nanoparticles, metalorganic nanoparticles, gold nanoparticles, magnetic nanoparticles and virus-like particles. See generally Xu, C. F. et al. (2021). Advanced Drug Delivery Reviews, 168:3-29.

### B. Talen

[0076] In one aspect, the present disclosure contemplates use of methods, components, and compositions relating to Transcription Activator-Like Effector Nucleases (TALENs) to effectuate augmentation of a nucleic acid sequence (e.g., a targeted gene.

[0077] TALE stands for “Transcription Activator-Like Effector” proteins, which include TALENs (“Transcription Activator-Like Effector Nucleases”). A method of using a TALE system for gene editing may also be referred to herein as a TALE method. TALEs are naturally occurring proteins from the plant pathogenic bacteria genus Xanthomonas, and contain DNA-binding domains composed of a series of 33-35-amino-acid repeat domains that each recognizes a single base pair. TALE specificity is determined by two hypervariable amino acids that are known as the repeat-variable di-residues (RVDs). Modular TALE repeats are linked together to recognize contiguous DNA sequences. A specific RVD in the DNA-binding domain recognizes a base in the target locus, providing a structural feature to assemble predictable DNA-binding domains. The DNA binding domains of a TALE are fused to the catalytic domain of a type IIS FokI endonuclease to make a targetable TALE nuclease. To induce site-specific mutation, two individual TALEN arms, separated by a 14-20 base pair spacer region, bring FokI monomers in close proximity to dimerize and produce a targeted double-strand break.

[0078] Several large, systematic studies utilizing various assembly methods have indicated that TALE repeats can be combined to recognize virtually any user-defined sequence. Custom-designed TALE arrays are also commercially available through Cellectis Bioresearch (Paris, France), Transposagen Biopharmaceuticals (Lexington, KY, USA), and Life Technologies (Grand Island, NY, USA). TALE and TALEN methods suitable for use in the present disclosure are described in U.S. Patent Application Publication Nos. US 2011/0201118 A1; US 2013/0117869 A1; US 2013/0315884 A1; US 2015/0203871 A1 and US 2016/0120906 A1, the disclosures of which are incorporated by reference herein.

[0079] Non-limiting examples of genes that may be silenced or inhibited by permanently gene-editing via a TALE method include NFKB1, NFKB2, and combinations thereof. Non-limiting examples of genes that may be augmented such that their resultant products function as decoys or dominant negatives by permanently gene-editing via a TALE method include NFKB1, NFKB2, and combinations thereof. Non-limiting examples of genes that may be enhanced by permanently gene-editing via a TALE method include NFKB1, NFKB2, and combinations thereof. In an aspect, the disclosure provides compositions for up-regulation of protein receptors (including wildtype or genetically edited), including those that bind to anti-inflammatory cytokines via a TALE method.

[0080] Examples of systems, methods, and compositions for altering the expression of a target gene sequence by a TALE method, and which may be used in accordance with embodiments of the present disclosure, are described in U.S. Pat. No. 8,586,526, which is incorporated by reference herein.

### C. Zinc-Finger Nucleases (ZFN)

[0081] In one aspect, the present disclosure contemplates use of methods, components, and compositions relating to zinc-finger nucleases (ZFNs) to effectuate augmentation of a nucleic acid sequence (e.g., a targeted gene).

[0082] An individual zinc finger contains approximately 30 amino acids in a conserved ββα configuration. Several amino acids on the surface of the (-helix typically contact 3 bp in the major groove of DNA, with varying levels of selectivity. Zinc fingers have two protein domains. The first domain is the DNA binding domain, which includes eukaryotic transcription factors and contain the zinc finger. The second domain is the nuclease domain, which includes the FokI restriction enzyme and is responsible for the catalytic cleavage of DNA.

[0083] The DNA-binding domains of individual ZFNs typically contain between three and six individual zinc finger repeats and can each recognize between 9 and 18 base pairs. If the zinc finger domains are specific for their intended target site then even a pair of 3-finger ZFNs that recognize a total of 18 base pairs can, in theory, target a single locus in a mammalian genome. One method to generate new zinc-finger arrays is to combine smaller zinc-finger “modules” of known specificity. The most common modular assembly process involves combining three separate zinc fingers that can each recognize a 3 base pair DNA sequence to generate a 3-finger array that can recognize a 9 base pair target site. Alternatively, selection-based approaches, such as oligomerized pool engineering (OPEN) can be used to select for new zinc-finger arrays from randomized libraries that take into consideration context-dependent interactions between neighboring fingers. Engineered zinc fingers are available commercially; Sangamo Biosciences (Richmond, CA, USA) has developed a propriety platform (CompoZr®) for zinc-finger construction in partnership with Sigma-Aldrich (St. Louis, MO, USA).

[0084] Non-limiting examples of genes that may be silenced or inhibited by permanently gene-editing via a zinc finger method include NFKB1, NFKB2, and combinations thereof. Non-limiting examples of genes that may be augmented such that their resultant products function as decoys or dominant negatives by permanently gene-editing via a zinc finger method include NFKB1, NFKB2, and combinations thereof. Non-limiting examples of genes that may be enhanced by permanently gene-editing via a zinc finger method include NFKB1, NFKB2, and combinations thereof. In an aspect, the disclosure provides compositions for up-regulation of protein receptors (including wildtype or genetically edited), including those that bind to anti-inflammatory cytokines via a zinc finger method.

[0085] Examples of systems, methods, and compositions for altering the expression of a target gene sequence by a zinc finger method, which may be used in accordance with embodiments of the present disclosure, are described in U.S. Pat. Nos. 6,534,261, 6,607,882, 6,746,838, 6,794,136, 6,824,978, 6,866,997, 6,933,113, 6,979,539, 7,013,219, 7,030,215, 7,220,719, 7,241,573, 7,241,574, 7,585,849, 7,595,376, 6,903,185, and 6,479,626, which are incorporated by reference herein.

[0086] Other examples of systems, methods, and compositions for altering the expression of a target gene sequence by a zinc finger method, which may be used in accordance with embodiments of the present disclosure, are described in Beane, et al., Mol. Therapy, 2015, 23 1380-1390, the disclosure of which is incorporated by reference herein.

### IV. Joint Disease or Illness

### A. Introduction

[0087] As described herein, embodiments of the present disclosure provide compositions and methods for improving joint function and treating joint disease. In particular embodiments, compositions and methods are provided to gene-edit synovial fibroblasts, synoviocytes, chondrocytes, tissue (resident) macrophages, or other cells to reduce pro-inflammatory signaling mediated by the binding of inflammatory cytokines-including, but not limited to, IL1α, IL1β, TNFα, IL6, IL8, IL18, IL33, matrix metalloproteinases (MMPs), TGFβ1, TGFβ2, and combinations thereof—to their cognate receptor(s) as a result of ROS and their cellular effectors. Some embodiments are used for treating various forms of arthritis and other inflammatory joint diseases. Some embodiments are further useful for treating canine lameness due to osteoarthritis. Some embodiments are further useful for treating equine lameness due to joint disease. Some embodiments are further useful for treating feline lameness due to joint disease. Some embodiments are also useful for treating post-traumatic arthritis, gout, pseudogout, psoriatic arthritis, and other inflammation-mediated or immune-mediated joint diseases.

[0088] Treatment of osteoarthritis, degenerative joint disease, and other joint dysfunctions is complex, and few long-term options exist for either symptomatic relief or restoring joint function. Osteoarthritis (OA) is the leading cause of disability due to pain. See, Neogi, T. (2013). Osteoarthritis Cartilage, 21(9):1145-53. OA and similar diseases impact all mammal species, including working animals, domestic pets, and their owners. The common mechanistic thread among joint diseases is the presence of acute of chronic inflammation, which is driven by increased levels of pro-inflammatory cytokine signaling. Joint diseases tend to take a progressive course that encompasses discomfort, pain, and—especially in the case of OA—disability, depending on the degree of disease progression.

[0089] Psoriatic arthritis (PsA) is another chronic inflammatory joint disease, in which the joint symptoms are accompanied by skin lesions, such as those commonly associated with psoriasis. See, Boehncke, W. et al. (2014). British Journal of Dermatology, 170(4):772-786. Like other forms of arthritis, such as OA, PsA is caused by pro-inflammatory signaling of a host of cytokines, including IL-1. Indeed, PsA morbidity has been shown to correlate with single nucleotide polymorphisms (SNPs) that impact the activity of the IL-1 gene locus. See, Rahman, P. et al. (2006). Arthritis and Rheumatism, 54(7):2321-2325. These studies also implicate inflammatory cytokine signaling, in general, and IL-1 more specifically, in disease progression.

[0090] Gout is a chronic inflammatory condition that affects joints. The underlying cause is monosodium urate (MSU) crystal deposition and the resultant host response, particularly in joint structures (as well as subcutaneous tissues and other sites). See, Dalbeth, N., & Stamp, L. (2014). Annals of the Rheumatic Diseases, 73(9):1598-1600. The clinical manifestations include recurrent acute flares of severe inflammatory arthritis and tendinobursitis. IL-1 and other pro-inflammatory mediators are a major contributor to this host response. See, Dinarello, C. A. (2014). Molecular Medicine, 20(1):S43-S58. To this end, effective blockade of these signaling pathways may provide relief to gout patients.

[0091] The current standard of care for many joint disease patients includes anti-inflammatory medications (e.g., NSAIDs) or anti-rheumatics (e.g., methotrexate [inhibitor of AICAR] or adalimumab [anti-TNF alpha monoclonal antibody]). See, Friedman, B., & Cronstein, B. (2019). Joint Bone Spine, 86(3):301-307. All of these treatments require repeated dosing for continued effectiveness, which may lead to toxicity issues or tolerance over time. As such, new methods and compositions to treat joint disease and illness are acutely needed to treat these chronic conditions.

[0092] In one aspect, the compositions and methods herein described are directed to treat joint disease or illness in a mammal in need thereof. In some embodiments, the joint disease or illness is osteoarthritis. In some embodiments, the joint disease or illness is psoriatic arthritis. In some embodiments, the joint disease or illness is gout.

[0093] Among the advantages of the present disclosure over treatments currently available for mammals afflicted with one or more joint disease or illness include the period of relief from symptoms. Upon genetic editing of a cell within a joint, pro-inflammatory signaling is silenced through the targeted gene for the life of that cell and any mitotic progeny. By contrast, biologic treatments require periodic dosing, which may magnify the impact of the host of potentially severe side effects. Among various genetic approaches, the present disclosure is also superior due to, among other reasons, a resistance to leakiness by virtue of modifying a protein receptor, rather than ablating expression of a ligand, which may result in compensatory effects (e.g., buildup of other factors due to lack of negative feedback).

[0094] In some embodiments, the present disclosure includes a method for the treatment or prevention of a joint disease or condition in a subject in need thereof, the method comprising administering, to a joint of the subject, a pharmaceutical composition comprising a therapeutically effective amount of a Clustered Regularly Interspaced Short Palindromic Repeats (CRISPR) gene-editing system, the system comprising (i) a CRISPR Associated (Cas) protein; and (ii) at least one guide RNA targeting an NFKB1 gene, an NFKB2 gene, or a combination thereof. In some embodiments, the joint disease or condition is osteoarthritis. In some embodiments, the joint disease or condition is psoriatic arthritis. In some embodiments, the joint disease or condition is gout.

[0095] In some embodiments, the present disclosure includes a method for the treatment or prevention of an arthritis. Non-limiting examples of arthritis the can be treated using the compositions and methods described herein include post-traumatic arthritis, osteoarthritis (a degenerative condition that affects the joints, most commonly the hips, knees, and hands), rheumatoid arthritis (an autoimmune disorder that causes inflammation in the joints and surrounding tissue), psoriatic arthritis (a type of arthritis that occurs in people with psoriasis, a skin condition characterized by scaly red patches), gout (a type of arthritis caused by the buildup of uric acid crystals in the joints), lupus (a chronic autoimmune disorder that can cause inflammation and damage to the joints, as well as other organs), ankylosing spondylitis (a type of arthritis that primarily affects the spine, causing inflammation and stiffness), reactive arthritis (a type of arthritis that occurs as a reaction to an infection in the body), septic arthritis (a type of arthritis caused by an infection in the joint), juvenile idiopathic arthritis (a form of arthritis that affects children under the age of 16), and fibromyalgia (a chronic pain disorder that can cause widespread pain and stiffness, including in the joints).

[0096] In some embodiments, the present disclosure includes a method for the treatment or prevention of pseudogout, Crystal arthropathies (caused by the formation of crystals in the joints, such as gout and pseudogout), or CPPD disease (calcium pyrophosphate deposition disease) also called chondrocalcinosis.

[0097] In some embodiments, the present disclosure includes a method for the treatment or prevention of rheumatoid arthritis, psoriasis, asthma, inflammatory bowel disease, multiple sclerosis, Alzheimer's disease, Type 2 diabetes, cardiovascular disease, or cancer. In some embodiments, these disorders are treated by administering a CRISPR composition, as described herein, targeting NFKB1 or NFKB2.

[0098] In some embodiments, the disclosure provides a method for treating or preventing free oxygen radicals in a subject in need thereof by administering a therapeutically effective amount of a composition, wherein the composition comprises: (i) an RNA-guided nuclease or a nucleic acid encoding an RNA-guided nuclease; and (ii) at least one guide RNA or a nucleic acid encoding at least one guide RNA targeting a NFKB1 or NFKB2 gene. In some embodiments, the RNA-guided nuclease or a nucleic acid encoding an RNA-guided nuclease and at least one guide RNA or a nucleic acid encoding at least one guide RNA are formulated in a lipid nanoparticle (LNP). In some embodiments, the at least one guide RNA comprises a crRNA sequence selected from SEQ ID NOS: 1-680 and 5323-5410. In some embodiments, the at least one guide RNA comprises a crRNA sequence selected from SEQ ID NOS: 1-148 and 329-497. In some embodiments, the at least one guide RNA comprises a crRNA sequence selected from SEQ ID NOS: 1-45 and 329-384. In some embodiments, the at least one guide RNA comprises a crRNA sequence selected from SEQ ID NOS: 1-13 and 329-335. In some embodiments, the pharmaceutical composition or method is for treating a joint disorder. In some embodiments, the pharmaceutical composition or method is for treating arthritis, osteoarthritis, rheumatoid arthritis, post-traumatic arthritis, gout, pseudogout, canine lameness, equine lameness, or feline lameness.

[0099] In some embodiments, the disclosure provides a method for treating or preventing free oxygen radicals in a subject in need thereof by administering a therapeutically effective amount of a composition, wherein the composition comprises: (i) an RNA-guided nuclease or a nucleic acid encoding an RNA-guided nuclease; and (ii) at least one guide RNA or a nucleic acid encoding at least one guide RNA targeting a gene selected from the group consisting of a 6-phosphogluconate dehydrogenase (6PGD) gene, an alcohol dehydrogenase (ADH) gene, an aldehyde dehydrogenase (ALDH2) gene, an AP-1 gene, a B-cell lymphoma-extra large (Bcl-XL) gene, a BCL2 apoptosis regulator (Bcl-2) gene, a Bcl-2-associated X protein (BAX) gene, a catalase (CAT) gene, a c-Jun N-terminal kinase (JNK) gene, a coenzyme Q10 gene, a CYP2E1 gene, a cytochrome c (Cyt c) gene, a F1Fo-ATP synthase gene, a ferritin heavy chain (FHC) gene, a glucose-6-phosphate dehydrogenase (G6PD) gene, a glutamylcysteine synthetase (GCS) gene, a glutathione (GSH) synthase gene, a glutathione peroxidase 1 (GPX1) gene, a glutathione peroxidase 2 (GPX2) gene, a glutathione peroxidase 3 (GPX3) gene, a glutathione peroxidase 4 (GPX4) gene, a glutathione peroxidase 5 (GPX5) gene, a glutathione peroxidase 6 (GPX6) gene, a glutathione peroxidase 7 (GPX7) gene, a glutathione peroxidase 8 (GPX8) gene, a glutathione reductase (GR) gene, a glycerol 3-phosphate dehydrogenase gene, a growth arrest and DNA damage (GADD 45) gene, a hypoxia-inducible factor 1-alpha (HIF-1α) gene, a mitogen-activated protein kinase (MAPK) gene, an NADH-ubiquinone oxidoreductase gene, an NADPH oxidase 4 (NOX4) gene, an NADPH oxidase 5 (NOX5) gene, a nuclear factor kappa-light-chain-enhancer of activated B cells (NF-κB) gene, a nuclear factor κB (NF-κB) essential modulator (NEMO) gene, a p46Shc (SHC isoform) gene, a p52Shc (SHC isoform) gene, a p53 upregulated modulator of apoptosis (PUMA) gene, a p66Shc (SHC isoform) gene, a phosphoinositide 3-kinase (PI3-K) gene, a proline oxidase (PIG6, POX) gene, a quinone oxidoreductase (PIG3, NQO1) gene, a respiratory complexes I gene, a respiratory complexes II gene, a respiratory complexes III gene, a respiratory complexes IV gene, a sestrin 1 (SESN1) gene, a sestrin 2 (SESN2) gene, an SHC adaptor protein 1 (SHC1) gene, a superoxide dismutase 1 (SOD1) gene, a superoxide dismutase 2 (SOD2) gene, a superoxide dismutase 3 (SOD3) gene, a TNF alpha induced protein 3 (TNFAIP3) gene, a tumor protein 53 (p53) gene, a tumor protein p53 inducible nuclear protein 1 (TP53INP1) gene, a ubiquinol-cytochrome c oxidoreductase gene, a 2B4 gene, an ABCA1 gene, an ACP5 gene, an ADAR-1 gene, an ADSS gene, an AIG1 gene, an AIM2 gene, an APOBEC3 gene, an ARRB2 gene, a B2M gene, a BCAS3 gene, a BMP4 gene, a C10orf32 gene, a C21orf33 gene, a CASP1 gene, a CCL5 gene, a CD160 gene, a Cd53 gene, a CDKN2A gene, a CHEK1 gene, a CNNM2 gene, a CNTNAP2 gene, a CSMD1 gene, a CTLA-4 gene, a CTSB gene, a C-type lectin receptors CLRs gene, a CXCL10 gene, a CYP17A1 gene, a DDX60 gene, a DYNC1I1 gene, a FOXO3a gene, a GPC6 gene, a GRN gene, an HCK gene, an HECW1 gene, an HLA gene, an IFI30 gene, an IFI44L gene, an IFI6 gene, an IFITM gene, an IFITM1/3 gene, an IFITM2 gene, an IFITM3 gene, an IL-18 gene, an IL-1α gene, an IL-1β gene, an interferon-γ gene, an interleukin-12 (IL-12) gene, an IRF gene, an IRF-1 gene, an gene, an IRF3 gene, an IRF7 gene, a LAG-3 gene, a LIPC gene, a MDA5/IFIH1 gene, a MPAK gene, a MYH9 gene, a MYO16 gene, a MYO5A gene, an NAIP gene, an NF-κB gene, an NLRC4 gene, an gene, an NLRP3 gene, a NOD2 gene, an gene, an NPL gene, an NR gene, a nucleotide oligomerization and binding domain NOD-like receptors gene, an OAS1 gene, an OAS2 gene, an OASL gene, a parkin gene (PARK2) gene, a PD-1 gene, a PLEKHG1 gene, av PRKCA gene, a PTBP1 gene, a PYCARD gene, a Pyrin-HIN (PYHIN) domain containing receptor gene (e.g. AIM2), a reactive oxygen species (ROS) gene, a retinoic acid inducible gene-I (RIG-I)-like receptor (RLRs) gene, an RFC3 gene, a RGS1 gene, a RIG-I/DDX58 gene, a SAMHD1 gene, a SF3A1/SF3B1 gene, a SFXN2 gene, a SLAMF7 gene, a SLC41A1 gene, a SLC8A1 gene, a SLCO3A1 gene, a STAT1 gene, a tetherin gene, a TLR5 gene, a TLR7 gene, a TLR9 gene, a Toll-like receptor (TLR) gene, a TREM2 gene, a TREX1 gene, a TRIM5 gene, a TTLL7 gene, and a TYROBP gene. In some embodiments, the guide RNA has a crRNA sequence selected from those sequences shown in FIG. 2. In some embodiments, the RNA-guided nuclease or a nucleic acid encoding an RNA-guided nuclease and at least one guide RNA or a nucleic acid encoding at least one guide RNA are formulated in a lipid nanoparticle (LNP). In some embodiments, the pharmaceutical composition or method is for treating a joint disorder. In some embodiments, the pharmaceutical composition or method is for treating arthritis, osteoarthritis, rheumatoid arthritis, post-traumatic arthritis, gout, pseudogout, canine lameness, equine lameness, or feline lameness.

### B. Osteoarthritis

[0100] In one aspect, the present disclosure encompasses treatments for osteoarthritis (OA). In some embodiments, OA treatment comprises a therapeutically effective amount of a Clustered Regularly Interspaced Short Palindromic Repeats (CRISPR) gene-editing system, the system comprising: (i) a CRISPR Associated (Cas) protein; and (ii) at least one guide RNA targeting NFKB1. In some embodiments, the OA treatment comprises a CRISPR gene-editing system targeting hNFKB1. In some embodiments, the OA treatment comprises a CRISPR gene-editing system targeting cNFKB1. In some embodiments, the OA treatment comprises a CRISP gene-editing system targeting eNFKB1. In some embodiments, the OA treatment comprises a CRISPR gene-editing system targeting fNFKB1.

[0101] In some embodiments, the CRISPR gene-editing system for the treatment of OA comprises one or more sgRNAs targeting exon 1 of hNFKB1. In some embodiments, the CRISPR gene-editing system for the treatment of OA comprises one or more sgRNAs targeting exon 2 of hNFKB1. In some embodiments, the CRISPR gene-editing system for the treatment of OA comprises one or more sgRNAs targeting exon 3 of hNFKB1. In some embodiments, the CRISPR gene-editing system for the treatment of OA comprises one or more sgRNAs targeting exon 4 of hNFKB1. In some embodiments, the CRISPR gene-editing system for the treatment of OA comprises one or more sgRNAs targeting exon 5 of hNFKB1. In some embodiments, the CRISPR gene-editing system for the treatment of OA comprises one or more sgRNAs targeting exon 6 of hNFKB1. In some embodiments, the CRISPR gene-editing system for the treatment of OA comprises one or more sgRNAs targeting exon 7 of hNFKB1. In some embodiments, the CRISPR gene-editing system for the treatment of OA comprises one or more sgRNAs targeting exon 8 of hNFKB1. In some embodiments, the CRISPR gene-editing system for the treatment of OA comprises one or more sgRNAs targeting exon 9 of hNFKB1. In some embodiments, the CRISPR gene-editing system for the treatment of OA comprises one or more sgRNAs targeting exon 10 of hNFKB1. In some embodiments, the CRISPR gene-editing system for the treatment of OA comprises one or more sgRNAs targeting exon 11 of hNFKB1. In some embodiments, the CRISPR gene-editing system for the treatment of OA comprises one or more sgRNAs targeting exon 12 of hNFKB1. In some embodiments, the CRISPR gene-editing system for the treatment of OA comprises one or more sgRNAs targeting exon 13 of hNFKB1. In some embodiments, the CRISPR gene-editing system for the treatment of OA comprises one or more sgRNAs targeting exon 14 of hNFKB1. In some embodiments, the CRISPR gene-editing system for the treatment of OA comprises one or more sgRNAs targeting exon 15 of hNFKB1. In some embodiments, the CRISPR gene-editing system for the treatment of OA comprises one or more sgRNAs targeting exon 16 of hNFKB1. In some embodiments, the CRISPR gene-editing system for the treatment of OA comprises one or more sgRNAs targeting exon 17 of hNFKB1. In some embodiments, the CRISPR gene-editing system for the treatment of OA comprises one or more sgRNAs targeting exon 18 of hNFKB1. In some embodiments, the CRISPR gene-editing system for the treatment of OA comprises one or more sgRNAs targeting exon 19 of hNFKB1. In some embodiments, the CRISPR gene-editing system for the treatment of OA comprises one or more sgRNAs targeting exon 20 of hNFKB1. In some embodiments, the CRISPR gene-editing system for the treatment of OA comprises one or more sgRNAs targeting exon 21 of hNFKB1. In some embodiments, the CRISPR gene-editing system for the treatment of OA comprises one or more sgRNAs targeting exon 22 of hNFKB1. In some embodiments, the CRISPR gene-editing system for the treatment of OA comprises one or more sgRNAs targeting exon 23 of hNFKB1. In some embodiments, the CRISPR gene-editing system for the treatment of OA comprises one or more sgRNAs targeting exon 24 of hNFKB1. In some embodiments, the CRISPR gene-editing system for the treatment of OA comprises one or more sgRNAs targeting exon 25 of hNFKB1. In some embodiments, the CRISPR gene-editing system for the treatment of OA comprises one or more sgRNAs targeting exon 26 of hNFKB1. In some embodiments, the CRISPR gene-editing system for the treatment of OA comprises one or more sgRNAs targeting exon 27 of hNFKB1.

[0102] In some embodiments, the CRISPR gene-editing system for the treatment of OA comprises one or more sgRNAs targeting exon 1 of cNFKB1. In some embodiments, the CRISPR gene-editing system for the treatment of OA comprises one or more sgRNAs targeting exon 2 of cNFKB1. In some embodiments, the CRISPR gene-editing system for the treatment of OA comprises one or more sgRNAs targeting exon 3 of cNFKB1. In some embodiments, the CRISPR gene-editing system for the treatment of OA comprises one or more sgRNAs targeting exon 4 of cNFKB1. In some embodiments, the CRISPR gene-editing system for the treatment of OA comprises one or more sgRNAs targeting exon 5 of cNFKB1. In some embodiments, the CRISPR gene-editing system for the treatment of OA comprises one or more sgRNAs targeting exon 6 of cNFKB1. In some embodiments, the CRISPR gene-editing system for the treatment of OA comprises one or more sgRNAs targeting exon 7 of cNFKB1. In some embodiments, the CRISPR gene-editing system for the treatment of OA comprises one or more sgRNAs targeting exon 8 of cNFKB1. In some embodiments, the CRISPR gene-editing system for the treatment of OA comprises one or more sgRNAs targeting exon 9 of cNFKB1. In some embodiments, the CRISPR gene-editing system for the treatment of OA comprises one or more sgRNAs targeting exon 10 of cNFKB1. In some embodiments, the CRISPR gene-editing system for the treatment of OA comprises one or more sgRNAs targeting exon 11 of cNFKB1. In some embodiments, the CRISPR gene-editing system for the treatment of OA comprises one or more sgRNAs targeting exon 12 of cNFKB1. In some embodiments, the CRISPR gene-editing system for the treatment of OA comprises one or more sgRNAs targeting exon 13 of cNFKB1. In some embodiments, the CRISPR gene-editing system for the treatment of OA comprises one or more sgRNAs targeting exon 14 of cNFKB1. In some embodiments, the CRISPR gene-editing system for the treatment of OA comprises one or more sgRNAs targeting exon 15 of cNFKB1. In some embodiments, the CRISPR gene-editing system for the treatment of OA comprises one or more sgRNAs targeting exon 16 of cNFKB1. In some embodiments, the CRISPR gene-editing system for the treatment of OA comprises one or more sgRNAs targeting exon 17 of cNFKB1. In some embodiments, the CRISPR gene-editing system for the treatment of OA comprises one or more sgRNAs targeting exon 18 of cNFKB1. In some embodiments, the CRISPR gene-editing system for the treatment of OA comprises one or more sgRNAs targeting exon 19 of cNFKB1. In some embodiments, the CRISPR gene-editing system for the treatment of OA comprises one or more sgRNAs targeting exon 20 of cNFKB1. In some embodiments, the CRISPR gene-editing system for the treatment of OA comprises one or more sgRNAs targeting exon 21 of cNFKB1. In some embodiments, the CRISPR gene-editing system for the treatment of OA comprises one or more sgRNAs targeting exon 22 of cNFKB1. In some embodiments, the CRISPR gene-editing system for the treatment of OA comprises one or more sgRNAs targeting exon 23 of cNFKB1. In some embodiments, the CRISPR gene-editing system for the treatment of OA comprises one or more sgRNAs targeting exon 24 of cNFKB1. In some embodiments, the CRISPR gene-editing system for the treatment of OA comprises one or more sgRNAs targeting exon 25 of cNFKB1.

[0103] In some embodiments, the CRISPR gene-editing system for the treatment of OA comprises one or more sgRNAs targeting exon 1 of eNFKB1. In some embodiments, the CRISPR gene-editing system for the treatment of OA comprises one or more sgRNAs targeting exon 2 of eNFKB1. In some embodiments, the CRISPR gene-editing system for the treatment of OA comprises one or more sgRNAs targeting exon 3 of eNFKB1. In some embodiments, the CRISPR gene-editing system for the treatment of OA comprises one or more sgRNAs targeting exon 4 of eNFKB1. In some embodiments, the CRISPR gene-editing system for the treatment of OA comprises one or more sgRNAs targeting exon 5 of eNFKB1. In some embodiments, the CRISPR gene-editing system for the treatment of OA comprises one or more sgRNAs targeting exon 6 of eNFKB1. In some embodiments, the CRISPR gene-editing system for the treatment of OA comprises one or more sgRNAs targeting exon 7 of eNFKB1. In some embodiments, the CRISPR gene-editing system for the treatment of OA comprises one or more sgRNAs targeting exon 8 of eNFKB1. In some embodiments, the CRISPR gene-editing system for the treatment of OA comprises one or more sgRNAs targeting exon 9 of eNFKB1. In some embodiments, the CRISPR gene-editing system for the treatment of OA comprises one or more sgRNAs targeting exon 10 of eNFKB1. In some embodiments, the CRISPR gene-editing system for the treatment of OA comprises one or more sgRNAs targeting exon 11 of eNFKB1. In some embodiments, the CRISPR gene-editing system for the treatment of OA comprises one or more sgRNAs targeting exon 12 of eNFKB1. In some embodiments, the CRISPR gene-editing system for the treatment of OA comprises one or more sgRNAs targeting exon 13 of eNFKB1. In some embodiments, the CRISPR gene-editing system for the treatment of OA comprises one or more sgRNAs targeting exon 14 of eNFKB1. In some embodiments, the CRISPR gene-editing system for the treatment of OA comprises one or more sgRNAs targeting exon 15 of eNFKB1. In some embodiments, the CRISPR gene-editing system for the treatment of OA comprises one or more sgRNAs targeting exon 16 of eNFKB1. In some embodiments, the CRISPR gene-editing system for the treatment of OA comprises one or more sgRNAs targeting exon 17 of eNFKB1. In some embodiments, the CRISPR gene-editing system for the treatment of OA comprises one or more sgRNAs targeting exon 18 of eNFKB1. In some embodiments, the CRISPR gene-editing system for the treatment of OA comprises one or more sgRNAs targeting exon 19 of eNFKB1. In some embodiments, the CRISPR gene-editing system for the treatment of OA comprises one or more sgRNAs targeting exon 20 of eNFKB1. In some embodiments, the CRISPR gene-editing system for the treatment of OA comprises one or more sgRNAs targeting exon 21 of eNFKB1. In some embodiments, the CRISPR gene-editing system for the treatment of OA comprises one or more sgRNAs targeting exon 22 of eNFKB1. In some embodiments, the CRISPR gene-editing system for the treatment of OA comprises one or more sgRNAs targeting exon 23 of eNFKB1. In some embodiments, the CRISPR gene-editing system for the treatment of OA comprises one or more sgRNAs targeting exon 24 of eNFKB1. In some embodiments, the CRISPR gene-editing system for the treatment of OA comprises one or more sgRNAs targeting exon 25 of eNFKB1. In some embodiments, the CRISPR gene-editing system for the treatment of OA comprises one or more sgRNAs targeting exon 26 of eNFKB1. In some embodiments, the CRISPR gene-editing system for the treatment of OA comprises one or more sgRNAs targeting exon 27 of eNFKB1. In some embodiments, the CRISPR gene-editing system for the treatment of OA comprises one or more sgRNAs targeting exon 28 of eNFKB1.

[0104] In some embodiments, the CRISPR gene-editing system for the treatment of OA comprises one or more sgRNAs targeting exon 1 of fNFKB1. In some embodiments, the CRISPR gene-editing system for the treatment of OA comprises one or more sgRNAs targeting exon 2 of fNFKB1. In some embodiments, the CRISPR gene-editing system for the treatment of OA comprises one or more sgRNAs targeting exon 3 of fNFKB1. In some embodiments, the CRISPR gene-editing system for the treatment of OA comprises one or more sgRNAs targeting exon 4 of fNFKB1. In some embodiments, the CRISPR gene-editing system for the treatment of OA comprises one or more sgRNAs targeting exon 5 of fNFKB1. In some embodiments, the CRISPR gene-editing system for the treatment of OA comprises one or more sgRNAs targeting exon 6 of fNFKB1. In some embodiments, the CRISPR gene-editing system for the treatment of OA comprises one or more sgRNAs targeting exon 7 of fNFKB1. In some embodiments, the CRISPR gene-editing system for the treatment of OA comprises one or more sgRNAs targeting exon 8 of fNFKB1. In some embodiments, the CRISPR gene-editing system for the treatment of OA comprises one or more sgRNAs targeting exon 9 of fNFKB1. In some embodiments, the CRISPR gene-editing system for the treatment of OA comprises one or more sgRNAs targeting exon 10 of fNFKB1. In some embodiments, the CRISPR gene-editing system for the treatment of OA comprises one or more sgRNAs targeting exon 11 of fNFKB1. In some embodiments, the CRISPR gene-editing system for the treatment of OA comprises one or more sgRNAs targeting exon 12 of fNFKB1. In some embodiments, the CRISPR gene-editing system for the treatment of OA comprises one or more sgRNAs targeting exon 13 of fNFKB1. In some embodiments, the CRISPR gene-editing system for the treatment of OA comprises one or more sgRNAs targeting exon 14 of fNFKB1. In some embodiments, the CRISPR gene-editing system for the treatment of OA comprises one or more sgRNAs targeting exon 15 of fNFKB1. In some embodiments, the CRISPR gene-editing system for the treatment of OA comprises one or more sgRNAs targeting exon 16 of fNFKB1. In some embodiments, the CRISPR gene-editing system for the treatment of OA comprises one or more sgRNAs targeting exon 17 of fNFKB1. In some embodiments, the CRISPR gene-editing system for the treatment of OA comprises one or more sgRNAs targeting exon 18 of fNFKB1. In some embodiments, the CRISPR gene-editing system for the treatment of OA comprises one or more sgRNAs targeting exon 19 of fNFKB1. In some embodiments, the CRISPR gene-editing system for the treatment of OA comprises one or more sgRNAs targeting exon 20 of fNFKB1. In some embodiments, the CRISPR gene-editing system for the treatment of OA comprises one or more sgRNAs targeting exon 21 of fNFKB1. In some embodiments, the CRISPR gene-editing system for the treatment of OA comprises one or more sgRNAs targeting exon 22 of fNFKB1. In some embodiments, the CRISPR gene-editing system for the treatment of OA comprises one or more sgRNAs targeting exon 23 of fNFKB1. In some embodiments, the CRISPR gene-editing system for the treatment of OA comprises one or more sgRNAs targeting exon 24 of fNFKB1. In some embodiments, the CRISPR gene-editing system for the treatment of OA comprises one or more sgRNAs targeting exon 25 of fNFKB1.

[0105] In some embodiments, the CRISPR gene-editing system for the treatment of OA comprises one or more sgRNAs targeting NFKB2. In some embodiments, the CRISPR gene-editing system for the treatment of OA comprises one or more sgRNAs targeting hNFKB2. In some embodiments, the CRISPR gene-editing system for the treatment of OA comprises one or more sgRNAs targeting cNFKB2. In some embodiments, the CRISPR gene-editing system for the treatment of OA comprises one or more sgRNAs targeting eNFKB2. In some embodiments, the CRISPR gene-editing system for the treatment of OA comprises one or more sgRNAs targeting fNFKB2.

[0106] In some embodiments, the CRISPR gene-editing system for the treatment of OA comprises one or more sgRNAs targeting exon 1 of hNFKB2. In some embodiments, the CRISPR gene-editing system for the treatment of OA comprises one or more sgRNAs targeting exon 2 of hNFKB2. In some embodiments, the CRISPR gene-editing system for the treatment of OA comprises one or more sgRNAs targeting exon 3 of hNFKB2. In some embodiments, the CRISPR gene-editing system for the treatment of OA comprises one or more sgRNAs targeting exon 4 of hNFKB2. In some embodiments, the CRISPR gene-editing system for the treatment of OA comprises one or more sgRNAs targeting exon 5 of hNFKB2. In some embodiments, the CRISPR gene-editing system for the treatment of OA comprises one or more sgRNAs targeting exon 6 of hNFKB2. In some embodiments, the CRISPR gene-editing system for the treatment of OA comprises one or more sgRNAs targeting exon 7 of hNFKB2. In some embodiments, the CRISPR gene-editing system for the treatment of OA comprises one or more sgRNAs targeting exon 8 of hNFKB2. In some embodiments, the CRISPR gene-editing system for the treatment of OA comprises one or more sgRNAs targeting exon 9 of hNFKB2. In some embodiments, the CRISPR gene-editing system for the treatment of OA comprises one or more sgRNAs targeting exon 10 of hNFKB2. In some embodiments, the CRISPR gene-editing system for the treatment of OA comprises one or more sgRNAs targeting exon 11 of hNFKB2. In some embodiments, the CRISPR gene-editing system for the treatment of OA comprises one or more sgRNAs targeting exon 12 of hNFKB2. In some embodiments, the CRISPR gene-editing system for the treatment of OA comprises one or more sgRNAs targeting exon 13 of hNFKB2. In some embodiments, the CRISPR gene-editing system for the treatment of OA comprises one or more sgRNAs targeting exon 14 of hNFKB2. In some embodiments, the CRISPR gene-editing system for the treatment of OA comprises one or more sgRNAs targeting exon 15 of hNFKB2. In some embodiments, the CRISPR gene-editing system for the treatment of OA comprises one or more sgRNAs targeting exon 16 of hNFKB2. In some embodiments, the CRISPR gene-editing system for the treatment of OA comprises one or more sgRNAs targeting exon 17 of hNFKB2. In some embodiments, the CRISPR gene-editing system for the treatment of OA comprises one or more sgRNAs targeting exon 18 of hNFKB2. In some embodiments, the CRISPR gene-editing system for the treatment of OA comprises one or more sgRNAs targeting exon 19 of hNFKB2. In some embodiments, the CRISPR gene-editing system for the treatment of OA comprises one or more sgRNAs targeting exon 20 of hNFKB2. In some embodiments, the CRISPR gene-editing system for the treatment of OA comprises one or more sgRNAs targeting exon 21 of hNFKB2. In some embodiments, the CRISPR gene-editing system for the treatment of OA comprises one or more sgRNAs targeting exon 22 of hNFKB2. In some embodiments, the CRISPR gene-editing system for the treatment of OA comprises one or more sgRNAs targeting exon 23 of hNFKB2. In some embodiments, the CRISPR gene-editing system for the treatment of OA comprises one or more sgRNAs targeting exon 24 of hNFKB2.

[0107] In some embodiments, the CRISPR gene-editing system for the treatment of OA comprises one or more sgRNAs targeting exon 1 of cNFKB2. In some embodiments, the CRISPR gene-editing system for the treatment of OA comprises one or more sgRNAs targeting exon 2 of cNFKB2. In some embodiments, the CRISPR gene-editing system for the treatment of OA comprises one or more sgRNAs targeting exon 3 of cNFKB2. In some embodiments, the CRISPR gene-editing system for the treatment of OA comprises one or more sgRNAs targeting exon 4 of cNFKB2. In some embodiments, the CRISPR gene-editing system for the treatment of OA comprises one or more sgRNAs targeting exon 5 of cNFKB2. In some embodiments, the CRISPR gene-editing system for the treatment of OA comprises one or more sgRNAs targeting exon 6 of cNFKB2. In some embodiments, the CRISPR gene-editing system for the treatment of OA comprises one or more sgRNAs targeting exon 7 of cNFKB2. In some embodiments, the CRISPR gene-editing system for the treatment of OA comprises one or more sgRNAs targeting exon 8 of cNFKB2. In some embodiments, the CRISPR gene-editing system for the treatment of OA comprises one or more sgRNAs targeting exon 9 of cNFKB2. In some embodiments, the CRISPR gene-editing system for the treatment of OA comprises one or more sgRNAs targeting exon 10 of cNFKB2. In some embodiments, the CRISPR gene-editing system for the treatment of OA comprises one or more sgRNAs targeting exon 11 of cNFKB2. In some embodiments, the CRISPR gene-editing system for the treatment of OA comprises one or more sgRNAs targeting exon 12 of cNFKB2. In some embodiments, the CRISPR gene-editing system for the treatment of OA comprises one or more sgRNAs targeting exon 13 of cNFKB2. In some embodiments, the CRISPR gene-editing system for the treatment of OA comprises one or more sgRNAs targeting exon 14 of cNFKB2. In some embodiments, the CRISPR gene-editing system for the treatment of OA comprises one or more sgRNAs targeting exon 15 of cNFKB2. In some embodiments, the CRISPR gene-editing system for the treatment of OA comprises one or more sgRNAs targeting exon 16 of cNFKB2. In some embodiments, the CRISPR gene-editing system for the treatment of OA comprises one or more sgRNAs targeting exon 17 of cNFKB2. In some embodiments, the CRISPR gene-editing system for the treatment of OA comprises one or more sgRNAs targeting exon 18 of cNFKB2. In some embodiments, the CRISPR gene-editing system for the treatment of OA comprises one or more sgRNAs targeting exon 19 of cNFKB2. In some embodiments, the CRISPR gene-editing system for the treatment of OA comprises one or more sgRNAs targeting exon 20 of cNFKB2. In some embodiments, the CRISPR gene-editing system for the treatment of OA comprises one or more sgRNAs targeting exon 21 of cNFKB2. In some embodiments, the CRISPR gene-editing system for the treatment of OA comprises one or more sgRNAs targeting exon 22 of cNFKB2. In some embodiments, the CRISPR gene-editing system for the treatment of OA comprises one or more sgRNAs targeting exon 23 of cNFKB2.

[0108] In some embodiments, the CRISPR gene-editing system for the treatment of OA comprises one or more sgRNAs targeting exon 1 of eNFKB2. In some embodiments, the CRISPR gene-editing system for the treatment of OA comprises one or more sgRNAs targeting exon 2 of eNFKB2. In some embodiments, the CRISPR gene-editing system for the treatment of OA comprises one or more sgRNAs targeting exon 3 of eNFKB2. In some embodiments, the CRISPR gene-editing system for the treatment of OA comprises one or more sgRNAs targeting exon 4 of eNFKB2. In some embodiments, the CRISPR gene-editing system for the treatment of OA comprises one or more sgRNAs targeting exon 5 of eNFKB2. In some embodiments, the CRISPR gene-editing system for the treatment of OA comprises one or more sgRNAs targeting exon 6 of eNFKB2. In some embodiments, the CRISPR gene-editing system for the treatment of OA comprises one or more sgRNAs targeting exon 7 of eNFKB2. In some embodiments, the CRISPR gene-editing system for the treatment of OA comprises one or more sgRNAs targeting exon 8 of eNFKB2. In some embodiments, the CRISPR gene-editing system for the treatment of OA comprises one or more sgRNAs targeting exon 9 of eNFKB2. In some embodiments, the CRISPR gene-editing system for the treatment of OA comprises one or more sgRNAs targeting exon 10 of eNFKB2. In some embodiments, the CRISPR gene-editing system for the treatment of OA comprises one or more sgRNAs targeting exon 11 of eNFKB2. In some embodiments, the CRISPR gene-editing system for the treatment of OA comprises one or more sgRNAs targeting exon 12 of eNFKB2. In some embodiments, the CRISPR gene-editing system for the treatment of OA comprises one or more sgRNAs targeting exon 13 of eNFKB2. In some embodiments, the CRISPR gene-editing system for the treatment of OA comprises one or more sgRNAs targeting exon 14 of eNFKB2. In some embodiments, the CRISPR gene-editing system for the treatment of OA comprises one or more sgRNAs targeting exon 15 of eNFKB2. In some embodiments, the CRISPR gene-editing system for the treatment of OA comprises one or more sgRNAs targeting exon 16 of eNFKB2. In some embodiments, the CRISPR gene-editing system for the treatment of OA comprises one or more sgRNAs targeting exon 17 of eNFKB2. In some embodiments, the CRISPR gene-editing system for the treatment of OA comprises one or more sgRNAs targeting exon 18 of eNFKB2. In some embodiments, the CRISPR gene-editing system for the treatment of OA comprises one or more sgRNAs targeting exon 19 of eNFKB2. In some embodiments, the CRISPR gene-editing system for the treatment of OA comprises one or more sgRNAs targeting exon 20 of eNFKB2. In some embodiments, the CRISPR gene-editing system for the treatment of OA comprises one or more sgRNAs targeting exon 21 of eNFKB2. In some embodiments, the CRISPR gene-editing system for the treatment of OA comprises one or more sgRNAs targeting exon 22 of eNFKB2. In some embodiments, the CRISPR gene-editing system for the treatment of OA comprises one or more sgRNAs targeting exon 23 of eNFKB2.

[0109] In some embodiments, the CRISPR gene-editing system for the treatment of OA comprises one or more sgRNAs targeting exon 1 of fNFKB2. In some embodiments, the CRISPR gene-editing system for the treatment of OA comprises one or more sgRNAs targeting exon 2 of fNFKB2. In some embodiments, the CRISPR gene-editing system for the treatment of OA comprises one or more sgRNAs targeting exon 3 of fNFKB2. In some embodiments, the CRISPR gene-editing system for the treatment of OA comprises one or more sgRNAs targeting exon 4 of fNFKB2. In some embodiments, the CRISPR gene-editing system for the treatment of OA comprises one or more sgRNAs targeting exon 5 of fNFKB2. In some embodiments, the CRISPR gene-editing system for the treatment of OA comprises one or more sgRNAs targeting exon 6 of fNFKB2. In some embodiments, the CRISPR gene-editing system for the treatment of OA comprises one or more sgRNAs targeting exon 7 of fNFKB2. In some embodiments, the CRISPR gene-editing system for the treatment of OA comprises one or more sgRNAs targeting exon 8 of fNFKB2. In some embodiments, the CRISPR gene-editing system for the treatment of OA comprises one or more sgRNAs targeting exon 9 of fNFKB2. In some embodiments, the CRISPR gene-editing system for the treatment of OA comprises one or more sgRNAs targeting exon 10 of fNFKB2. In some embodiments, the CRISPR gene-editing system for the treatment of OA comprises one or more sgRNAs targeting exon 11 of fNFKB2. In some embodiments, the CRISPR gene-editing system for the treatment of OA comprises one or more sgRNAs targeting exon 12 of fNFKB2. In some embodiments, the CRISPR gene-editing system for the treatment of OA comprises one or more sgRNAs targeting exon 13 of fNFKB2. In some embodiments, the CRISPR gene-editing system for the treatment of OA comprises one or more sgRNAs targeting exon 14 of fNFKB2. In some embodiments, the CRISPR gene-editing system for the treatment of OA comprises one or more sgRNAs targeting exon 15 of fNFKB2. In some embodiments, the CRISPR gene-editing system for the treatment of OA comprises one or more sgRNAs targeting exon 16 of fNFKB2. In some embodiments, the CRISPR gene-editing system for the treatment of OA comprises one or more sgRNAs targeting exon 17 of fNFKB2. In some embodiments, the CRISPR gene-editing system for the treatment of OA comprises one or more sgRNAs targeting exon 18 of fNFKB2. In some embodiments, the CRISPR gene-editing system for the treatment of OA comprises one or more sgRNAs targeting exon 19 of fNFKB2. In some embodiments, the CRISPR gene-editing system for the treatment of OA comprises one or more sgRNAs targeting exon 20 of fNFKB2. In some embodiments, the CRISPR gene-editing system for the treatment of OA comprises one or more sgRNAs targeting exon 21 of fNFKB2. In some embodiments, the CRISPR gene-editing system for the treatment of OA comprises one or more sgRNAs targeting exon 22 of fNFKB2. In some embodiments, the CRISPR gene-editing system for the treatment of OA comprises one or more sgRNAs targeting exon 23 of fNFKB2.

### C. Psoriatic Arthritis

[0110] In one aspect, the present disclosure encompasses treatments for psoriatic arthritis (PsA). In some embodiments, the psoriatic arthritis treatment comprises a therapeutically effective amount of a Clustered Regularly Interspaced Short Palindromic Repeats (CRISPR) gene-editing system, the system comprising: (i) a CRISPR Associated (Cas) protein; and (ii) at least one guide RNA targeting NFKB1. In some embodiments, the psoriatic arthritis treatment comprises a CRISPR gene-editing system targeting hNFKB1. In some embodiments, the psoriatic arthritis treatment comprises a CRISPR gene-editing system targeting cNFKB1. In some embodiments, the psoriatic arthritis treatment comprises a CRISPR gene-editing system targeting eNFKB1. In some embodiments, the psoriatic arthritis treatment comprises a CRISPR gene-editing system targeting fNFKB1.

[0111] In some embodiments, the CRISPR gene-editing system for the treatment of psoriatic arthritis comprises one or more sgRNAs targeting exon 1 of hNFKB1. In some embodiments, the CRISPR gene-editing system for the treatment of psoriatic arthritis comprises one or more sgRNAs targeting exon 2 of hNFKB1. In some embodiments, the CRISPR gene-editing system for the treatment of psoriatic arthritis comprises one or more sgRNAs targeting exon 3 of hNFKB1. In some embodiments, the CRISPR gene-editing system for the treatment of psoriatic arthritis comprises one or more sgRNAs targeting exon 4 of hNFKB1. In some embodiments, the CRISPR gene-editing system for the treatment of psoriatic arthritis comprises one or more sgRNAs targeting exon 5 of hNFKB1. In some embodiments, the CRISPR gene-editing system for the treatment of psoriatic arthritis comprises one or more sgRNAs targeting exon 6 of hNFKB1. In some embodiments, the CRISPR gene-editing system for the treatment of psoriatic arthritis comprises one or more sgRNAs targeting exon 7 of hNFKB1. In some embodiments, the CRISPR gene-editing system for the treatment of psoriatic arthritis comprises one or more sgRNAs targeting exon 8 of hNFKB1. In some embodiments, the CRISPR gene-editing system for the treatment of psoriatic arthritis comprises one or more sgRNAs targeting exon 9 of hNFKB1. In some embodiments, the CRISPR gene-editing system for the treatment of psoriatic arthritis comprises one or more sgRNAs targeting exon 10 of hNFKB1. In some embodiments, the CRISPR gene-editing system for the treatment of psoriatic arthritis comprises one or more sgRNAs targeting exon 11 of hNFKB1. In some embodiments, the CRISPR gene-editing system for the treatment of psoriatic arthritis comprises one or more sgRNAs targeting exon 12 of hNFKB1. In some embodiments, the CRISPR gene-editing system for the treatment of psoriatic arthritis comprises one or more sgRNAs targeting exon 13 of hNFKB1. In some embodiments, the CRISPR gene-editing system for the treatment of psoriatic arthritis comprises one or more sgRNAs targeting exon 14 of hNFKB1. In some embodiments, the CRISPR gene-editing system for the treatment of psoriatic arthritis comprises one or more sgRNAs targeting exon 15 of hNFKB1. In some embodiments, the CRISPR gene-editing system for the treatment of psoriatic arthritis comprises one or more sgRNAs targeting exon 16 of hNFKB1. In some embodiments, the CRISPR gene-editing system for the treatment of psoriatic arthritis comprises one or more sgRNAs targeting exon 17 of hNFKB1. In some embodiments, the CRISPR gene-editing system for the treatment of psoriatic arthritis comprises one or more sgRNAs targeting exon 18 of hNFKB1. In some embodiments, the CRISPR gene-editing system for the treatment of psoriatic arthritis comprises one or more sgRNAs targeting exon 19 of hNFKB1. In some embodiments, the CRISPR gene-editing system for the treatment of psoriatic arthritis comprises one or more sgRNAs targeting exon 20 of hNFKB1. In some embodiments, the CRISPR gene-editing system for the treatment of psoriatic arthritis comprises one or more sgRNAs targeting exon 21 of hNFKB1. In some embodiments, the CRISPR gene-editing system for the treatment of psoriatic arthritis comprises one or more sgRNAs targeting exon 22 of hNFKB1. In some embodiments, the CRISPR gene-editing system for the treatment of psoriatic arthritis comprises one or more sgRNAs targeting exon 23 of hNFKB1. In some embodiments, the CRISPR gene-editing system for the treatment of psoriatic arthritis comprises one or more sgRNAs targeting exon 24 of hNFKB1. In some embodiments, the CRISPR gene-editing system for the treatment of psoriatic arthritis comprises one or more sgRNAs targeting exon 25 of hNFKB1. In some embodiments, the CRISPR gene-editing system for the treatment of psoriatic arthritis comprises one or more sgRNAs targeting exon 26 of hNFKB1. In some embodiments, the CRISPR gene-editing system for the treatment of psoriatic arthritis comprises one or more sgRNAs targeting exon 27 of hNFKB1.

[0112] In some embodiments, the CRISPR gene-editing system for the treatment of psoriatic arthritis comprises one or more sgRNAs targeting exon 1 of cNFKB1. In some embodiments, the CRISPR gene-editing system for the treatment of psoriatic arthritis comprises one or more sgRNAs targeting exon 2 of cNFKB1. In some embodiments, the CRISPR gene-editing system for the treatment of psoriatic arthritis comprises one or more sgRNAs targeting exon 3 of cNFKB1. In some embodiments, the CRISPR gene-editing system for the treatment of psoriatic arthritis comprises one or more sgRNAs targeting exon 4 of cNFKB1. In some embodiments, the CRISPR gene-editing system for the treatment of psoriatic arthritis comprises one or more sgRNAs targeting exon 5 of cNFKB1. In some embodiments, the CRISPR gene-editing system for the treatment of psoriatic arthritis comprises one or more sgRNAs targeting exon 6 of cNFKB1. In some embodiments, the CRISPR gene-editing system for the treatment of psoriatic arthritis comprises one or more sgRNAs targeting exon 7 of cNFKB1. In some embodiments, the CRISPR gene-editing system for the treatment of psoriatic arthritis comprises one or more sgRNAs targeting exon 8 of cNFKB1. In some embodiments, the CRISPR gene-editing system for the treatment of psoriatic arthritis comprises one or more sgRNAs targeting exon 9 of cNFKB1. In some embodiments, the CRISPR gene-editing system for the treatment of psoriatic arthritis comprises one or more sgRNAs targeting exon 10 of cNFKB1. In some embodiments, the CRISPR gene-editing system for the treatment of psoriatic arthritis comprises one or more sgRNAs targeting exon 11 of cNFKB1. In some embodiments, the CRISPR gene-editing system for the treatment of psoriatic arthritis comprises one or more sgRNAs targeting exon 12 of cNFKB1. In some embodiments, the CRISPR gene-editing system for the treatment of psoriatic arthritis comprises one or more sgRNAs targeting exon 13 of cNFKB1. In some embodiments, the CRISPR gene-editing system for the treatment of psoriatic arthritis comprises one or more sgRNAs targeting exon 14 of cNFKB1. In some embodiments, the CRISPR gene-editing system for the treatment of psoriatic arthritis comprises one or more sgRNAs targeting exon 15 of cNFKB1. In some embodiments, the CRISPR gene-editing system for the treatment of psoriatic arthritis comprises one or more sgRNAs targeting exon 16 of cNFKB1. In some embodiments, the CRISPR gene-editing system for the treatment of psoriatic arthritis comprises one or more sgRNAs targeting exon 17 of cNFKB1. In some embodiments, the CRISPR gene-editing system for the treatment of psoriatic arthritis comprises one or more sgRNAs targeting exon 18 of cNFKB1. In some embodiments, the CRISPR gene-editing system for the treatment of psoriatic arthritis comprises one or more sgRNAs targeting exon 19 of cNFKB1. In some embodiments, the CRISPR gene-editing system for the treatment of psoriatic arthritis comprises one or more sgRNAs targeting exon 20 of cNFKB1. In some embodiments, the CRISPR gene-editing system for the treatment of psoriatic arthritis comprises one or more sgRNAs targeting exon 21 of cNFKB1. In some embodiments, the CRISPR gene-editing system for the treatment of psoriatic arthritis comprises one or more sgRNAs targeting exon 22 of cNFKB1. In some embodiments, the CRISPR gene-editing system for the treatment of psoriatic arthritis comprises one or more sgRNAs targeting exon 23 of cNFKB1. In some embodiments, the CRISPR gene-editing system for the treatment of psoriatic arthritis comprises one or more sgRNAs targeting exon 24 of cNFKB1. In some embodiments, the CRISPR gene-editing system for the treatment of psoriatic arthritis comprises one or more sgRNAs targeting exon 25 of cNFKB1.

[0113] In some embodiments, the CRISPR gene-editing system for the treatment of psoriatic arthritis comprises one or more sgRNAs targeting exon 1 of eNFKB1. In some embodiments, the CRISPR gene-editing system for the treatment of psoriatic arthritis comprises one or more sgRNAs targeting exon 2 of eNFKB1. In some embodiments, the CRISPR gene-editing system for the treatment of psoriatic arthritis comprises one or more sgRNAs targeting exon 3 of eNFKB1. In some embodiments, the CRISPR gene-editing system for the treatment of psoriatic arthritis comprises one or more sgRNAs targeting exon 4 of eNFKB1. In some embodiments, the CRISPR gene-editing system for the treatment of psoriatic arthritis comprises one or more sgRNAs targeting exon 5 of eNFKB1. In some embodiments, the CRISPR gene-editing system for the treatment of psoriatic arthritis comprises one or more sgRNAs targeting exon 6 of eNFKB1. In some embodiments, the CRISPR gene-editing system for the treatment of psoriatic arthritis comprises one or more sgRNAs targeting exon 7 of eNFKB1. In some embodiments, the CRISPR gene-editing system for the treatment of psoriatic arthritis comprises one or more sgRNAs targeting exon 8 of eNFKB1. In some embodiments, the CRISPR gene-editing system for the treatment of psoriatic arthritis comprises one or more sgRNAs targeting exon 9 of eNFKB1. In some embodiments, the CRISPR gene-editing system for the treatment of psoriatic arthritis comprises one or more sgRNAs targeting exon 10 of eNFKB1. In some embodiments, the CRISPR gene-editing system for the treatment of psoriatic arthritis comprises one or more sgRNAs targeting exon 11 of eNFKB1. In some embodiments, the CRISPR gene-editing system for the treatment of psoriatic arthritis comprises one or more sgRNAs targeting exon 12 of eNFKB1. In some embodiments, the CRISPR gene-editing system for the treatment of psoriatic arthritis comprises one or more sgRNAs targeting exon 13 of eNFKB1. In some embodiments, the CRISPR gene-editing system for the treatment of psoriatic arthritis comprises one or more sgRNAs targeting exon 14 of eNFKB1. In some embodiments, the CRISPR gene-editing system for the treatment of psoriatic arthritis comprises one or more sgRNAs targeting exon 15 of eNFKB1. In some embodiments, the CRISPR gene-editing system for the treatment of psoriatic arthritis comprises one or more sgRNAs targeting exon 16 of eNFKB1. In some embodiments, the CRISPR gene-editing system for the treatment of psoriatic arthritis comprises one or more sgRNAs targeting exon 17 of eNFKB1. In some embodiments, the CRISPR gene-editing system for the treatment of psoriatic arthritis comprises one or more sgRNAs targeting exon 18 of eNFKB1. In some embodiments, the CRISPR gene-editing system for the treatment of psoriatic arthritis comprises one or more sgRNAs targeting exon 19 of eNFKB1. In some embodiments, the CRISPR gene-editing system for the treatment of psoriatic arthritis comprises one or more sgRNAs targeting exon 20 of eNFKB1. In some embodiments, the CRISPR gene-editing system for the treatment of psoriatic arthritis comprises one or more sgRNAs targeting exon 21 of eNFKB1. In some embodiments, the CRISPR gene-editing system for the treatment of psoriatic arthritis comprises one or more sgRNAs targeting exon 22 of eNFKB1. In some embodiments, the CRISPR gene-editing system for the treatment of psoriatic arthritis comprises one or more sgRNAs targeting exon 23 of eNFKB1. In some embodiments, the CRISPR gene-editing system for the treatment of psoriatic arthritis comprises one or more sgRNAs targeting exon 24 of eNFKB1. In some embodiments, the CRISPR gene-editing system for the treatment of psoriatic arthritis comprises one or more sgRNAs targeting exon 25 of eNFKB1. In some embodiments, the CRISPR gene-editing system for the treatment of psoriatic arthritis comprises one or more sgRNAs targeting exon 26 of eNFKB1. In some embodiments, the CRISPR gene-editing system for the treatment of psoriatic arthritis comprises one or more sgRNAs targeting exon 27 of eNFKB1. In some embodiments, the CRISPR gene-editing system for the treatment of psoriatic arthritis comprises one or more sgRNAs targeting exon 28 of eNFKB1.

[0114] In some embodiments, the CRISPR gene-editing system for the treatment of psoriatic arthritis comprises one or more sgRNAs targeting exon 1 of fNFKB1. In some embodiments, the CRISPR gene-editing system for the treatment of psoriatic arthritis comprises one or more sgRNAs targeting exon 2 of fNFKB1. In some embodiments, the CRISPR gene-editing system for the treatment of psoriatic arthritis comprises one or more sgRNAs targeting exon 3 of fNFKB1. In some embodiments, the CRISPR gene-editing system for the treatment of psoriatic arthritis comprises one or more sgRNAs targeting exon 4 of fNFKB1. In some embodiments, the CRISPR gene-editing system for the treatment of psoriatic arthritis comprises one or more sgRNAs targeting exon 5 of fNFKB1. In some embodiments, the CRISPR gene-editing system for the treatment of psoriatic arthritis comprises one or more sgRNAs targeting exon 6 of fNFKB1. In some embodiments, the CRISPR gene-editing system for the treatment of psoriatic arthritis comprises one or more sgRNAs targeting exon 7 of fNFKB1. In some embodiments, the CRISPR gene-editing system for the treatment of psoriatic arthritis comprises one or more sgRNAs targeting exon 8 of fNFKB1. In some embodiments, the CRISPR gene-editing system for the treatment of psoriatic arthritis comprises one or more sgRNAs targeting exon 9 of fNFKB1. In some embodiments, the CRISPR gene-editing system for the treatment of psoriatic arthritis comprises one or more sgRNAs targeting exon 10 of fNFKB1. In some embodiments, the CRISPR gene-editing system for the treatment of psoriatic arthritis comprises one or more sgRNAs targeting exon 11 of fNFKB1. In some embodiments, the CRISPR gene-editing system for the treatment of psoriatic arthritis comprises one or more sgRNAs targeting exon 12 of fNFKB1. In some embodiments, the CRISPR gene-editing system for the treatment of psoriatic arthritis comprises one or more sgRNAs targeting exon 13 of fNFKB1. In some embodiments, the CRISPR gene-editing system for the treatment of psoriatic arthritis comprises one or more sgRNAs targeting exon 14 of fNFKB1. In some embodiments, the CRISPR gene-editing system for the treatment of psoriatic arthritis comprises one or more sgRNAs targeting exon 15 of fNFKB1. In some embodiments, the CRISPR gene-editing system for the treatment of psoriatic arthritis comprises one or more sgRNAs targeting exon 16 of fNFKB1. In some embodiments, the CRISPR gene-editing system for the treatment of psoriatic arthritis comprises one or more sgRNAs targeting exon 17 of fNFKB1. In some embodiments, the CRISPR gene-editing system for the treatment of psoriatic arthritis comprises one or more sgRNAs targeting exon 18 of fNFKB1. In some embodiments, the CRISPR gene-editing system for the treatment of psoriatic arthritis comprises one or more sgRNAs targeting exon 19 of fNFKB1. In some embodiments, the CRISPR gene-editing system for the treatment of psoriatic arthritis comprises one or more sgRNAs targeting exon 20 of fNFKB1. In some embodiments, the CRISPR gene-editing system for the treatment of psoriatic arthritis comprises one or more sgRNAs targeting exon 21 of fNFKB1. In some embodiments, the CRISPR gene-editing system for the treatment of psoriatic arthritis comprises one or more sgRNAs targeting exon 22 of fNFKB1. In some embodiments, the CRISPR gene-editing system for the treatment of psoriatic arthritis comprises one or more sgRNAs targeting exon 23 of fNFKB1. In some embodiments, the CRISPR gene-editing system for the treatment of psoriatic arthritis comprises one or more sgRNAs targeting exon 24 of fNFKB1. In some embodiments, the CRISPR gene-editing system for the treatment of psoriatic arthritis comprises one or more sgRNAs targeting exon 25 of fNFKB1.

[0115] In some embodiments, the CRISPR gene-editing system for the treatment of psoriatic arthritis comprises one or more sgRNAs targeting NFKB2. In some embodiments, the CRISPR gene-editing system for the treatment of psoriatic arthritis comprises one or more sgRNAs targeting hNFKB2. In some embodiments, the CRISPR gene-editing system for the treatment of psoriatic arthritis comprises one or more sgRNAs targeting cNFKB2. In some embodiments, the CRISPR gene-editing system for the treatment of psoriatic arthritis comprises one or more sgRNAs targeting eNFKB2. In some embodiments, the CRISPR gene-editing system for the treatment of psoriatic arthritis comprises one or more sgRNAs targeting fNFKB2.

[0116] In some embodiments, the CRISPR gene-editing system for the treatment of psoriatic arthritis comprises one or more sgRNAs targeting exon 1 of hNFKB2. In some embodiments, the CRISPR gene-editing system for the treatment of psoriatic arthritis comprises one or more sgRNAs targeting exon 2 of hNFKB2. In some embodiments, the CRISPR gene-editing system for the treatment of psoriatic arthritis comprises one or more sgRNAs targeting exon 3 of hNFKB2. In some embodiments, the CRISPR gene-editing system for the treatment of psoriatic arthritis comprises one or more sgRNAs targeting exon 4 of hNFKB2. In some embodiments, the CRISPR gene-editing system for the treatment of psoriatic arthritis comprises one or more sgRNAs targeting exon 5 of hNFKB2. In some embodiments, the CRISPR gene-editing system for the treatment of psoriatic arthritis comprises one or more sgRNAs targeting exon 6 of hNFKB2. In some embodiments, the CRISPR gene-editing system for the treatment of psoriatic arthritis comprises one or more sgRNAs targeting exon 7 of hNFKB2. In some embodiments, the CRISPR gene-editing system for the treatment of psoriatic arthritis comprises one or more sgRNAs targeting exon 8 of hNFKB2. In some embodiments, the CRISPR gene-editing system for the treatment of psoriatic arthritis comprises one or more sgRNAs targeting exon 9 of hNFKB2. In some embodiments, the CRISPR gene-editing system for the treatment of psoriatic arthritis comprises one or more sgRNAs targeting exon 10 of hNFKB2. In some embodiments, the CRISPR gene-editing system for the treatment of psoriatic arthritis comprises one or more sgRNAs targeting exon 11 of hNFKB2. In some embodiments, the CRISPR gene-editing system for the treatment of psoriatic arthritis comprises one or more sgRNAs targeting exon 12 of hNFKB2. In some embodiments, the CRISPR gene-editing system for the treatment of psoriatic arthritis comprises one or more sgRNAs targeting exon 13 of hNFKB2. In some embodiments, the CRISPR gene-editing system for the treatment of psoriatic arthritis comprises one or more sgRNAs targeting exon 14 of hNFKB2. In some embodiments, the CRISPR gene-editing system for the treatment of psoriatic arthritis comprises one or more sgRNAs targeting exon 15 of hNFKB2. In some embodiments, the CRISPR gene-editing system for the treatment of psoriatic arthritis comprises one or more sgRNAs targeting exon 16 of hNFKB2. In some embodiments, the CRISPR gene-editing system for the treatment of psoriatic arthritis comprises one or more sgRNAs targeting exon 17 of hNFKB2. In some embodiments, the CRISPR gene-editing system for the treatment of psoriatic arthritis comprises one or more sgRNAs targeting exon 18 of hNFKB2. In some embodiments, the CRISPR gene-editing system for the treatment of psoriatic arthritis comprises one or more sgRNAs targeting exon 19 of hNFKB2. In some embodiments, the CRISPR gene-editing system for the treatment of psoriatic arthritis comprises one or more sgRNAs targeting exon 20 of hNFKB2. In some embodiments, the CRISPR gene-editing system for the treatment of psoriatic arthritis comprises one or more sgRNAs targeting exon 21 of hNFKB2. In some embodiments, the CRISPR gene-editing system for the treatment of psoriatic arthritis comprises one or more sgRNAs targeting exon 22 of hNFKB2. In some embodiments, the CRISPR gene-editing system for the treatment of psoriatic arthritis comprises one or more sgRNAs targeting exon 23 of hNFKB2. In some embodiments, the CRISPR gene-editing system for the treatment of psoriatic arthritis comprises one or more sgRNAs targeting exon 24 of hNFKB2.

[0117] In some embodiments, the CRISPR gene-editing system for the treatment of psoriatic arthritis comprises one or more sgRNAs targeting exon 1 of cNFKB2. In some embodiments, the CRISPR gene-editing system for the treatment of psoriatic arthritis comprises one or more sgRNAs targeting exon 2 of cNFKB2. In some embodiments, the CRISPR gene-editing system for the treatment of psoriatic arthritis comprises one or more sgRNAs targeting exon 3 of cNFKB2. In some embodiments, the CRISPR gene-editing system for the treatment of psoriatic arthritis comprises one or more sgRNAs targeting exon 4 of cNFKB2. In some embodiments, the CRISPR gene-editing system for the treatment of psoriatic arthritis comprises one or more sgRNAs targeting exon 5 of cNFKB2. In some embodiments, the CRISPR gene-editing system for the treatment of psoriatic arthritis comprises one or more sgRNAs targeting exon 6 of cNFKB2. In some embodiments, the CRISPR gene-editing system for the treatment of psoriatic arthritis comprises one or more sgRNAs targeting exon 7 of cNFKB2. In some embodiments, the CRISPR gene-editing system for the treatment of psoriatic arthritis comprises one or more sgRNAs targeting exon 8 of cNFKB2. In some embodiments, the CRISPR gene-editing system for the treatment of psoriatic arthritis comprises one or more sgRNAs targeting exon 9 of cNFKB2. In some embodiments, the CRISPR gene-editing system for the treatment of psoriatic arthritis comprises one or more sgRNAs targeting exon 10 of cNFKB2. In some embodiments, the CRISPR gene-editing system for the treatment of psoriatic arthritis comprises one or more sgRNAs targeting exon 11 of cNFKB2. In some embodiments, the CRISPR gene-editing system for the treatment of psoriatic arthritis comprises one or more sgRNAs targeting exon 12 of cNFKB2. In some embodiments, the CRISPR gene-editing system for the treatment of psoriatic arthritis comprises one or more sgRNAs targeting exon 13 of cNFKB2. In some embodiments, the CRISPR gene-editing system for the treatment of psoriatic arthritis comprises one or more sgRNAs targeting exon 14 of cNFKB2. In some embodiments, the CRISPR gene-editing system for the treatment of psoriatic arthritis comprises one or more sgRNAs targeting exon 15 of cNFKB2. In some embodiments, the CRISPR gene-editing system for the treatment of psoriatic arthritis comprises one or more sgRNAs targeting exon 16 of cNFKB2. In some embodiments, the CRISPR gene-editing system for the treatment of psoriatic arthritis comprises one or more sgRNAs targeting exon 17 of cNFKB2. In some embodiments, the CRISPR gene-editing system for the treatment of psoriatic arthritis comprises one or more sgRNAs targeting exon 18 of cNFKB2. In some embodiments, the CRISPR gene-editing system for the treatment of psoriatic arthritis comprises one or more sgRNAs targeting exon 19 of cNFKB2. In some embodiments, the CRISPR gene-editing system for the treatment of psoriatic arthritis comprises one or more sgRNAs targeting exon 20 of cNFKB2. In some embodiments, the CRISPR gene-editing system for the treatment of psoriatic arthritis comprises one or more sgRNAs targeting exon 21 of cNFKB2. In some embodiments, the CRISPR gene-editing system for the treatment of psoriatic arthritis comprises one or more sgRNAs targeting exon 22 of cNFKB2. In some embodiments, the CRISPR gene-editing system for the treatment of psoriatic arthritis comprises one or more sgRNAs targeting exon 23 of cNFKB2.

[0118] In some embodiments, the CRISPR gene-editing system for the treatment of psoriatic arthritis comprises one or more sgRNAs targeting exon 1 of eNFKB2. In some embodiments, the CRISPR gene-editing system for the treatment of psoriatic arthritis comprises one or more sgRNAs targeting exon 2 of eNFKB2. In some embodiments, the CRISPR gene-editing system for the treatment of psoriatic arthritis comprises one or more sgRNAs targeting exon 3 of eNFKB2. In some embodiments, the CRISPR gene-editing system for the treatment of psoriatic arthritis comprises one or more sgRNAs targeting exon 4 of eNFKB2. In some embodiments, the CRISPR gene-editing system for the treatment of psoriatic arthritis comprises one or more sgRNAs targeting exon 5 of eNFKB2. In some embodiments, the CRISPR gene-editing system for the treatment of psoriatic arthritis comprises one or more sgRNAs targeting exon 6 of eNFKB2. In some embodiments, the CRISPR gene-editing system for the treatment of psoriatic arthritis comprises one or more sgRNAs targeting exon 7 of eNFKB2. In some embodiments, the CRISPR gene-editing system for the treatment of psoriatic arthritis comprises one or more sgRNAs targeting exon 8 of eNFKB2. In some embodiments, the CRISPR gene-editing system for the treatment of psoriatic arthritis comprises one or more sgRNAs targeting exon 9 of eNFKB2. In some embodiments, the CRISPR gene-editing system for the treatment of psoriatic arthritis comprises one or more sgRNAs targeting exon 10 of eNFKB2. In some embodiments, the CRISPR gene-editing system for the treatment of psoriatic arthritis comprises one or more sgRNAs targeting exon 11 of eNFKB2. In some embodiments, the CRISPR gene-editing system for the treatment of psoriatic arthritis comprises one or more sgRNAs targeting exon 12 of eNFKB2. In some embodiments, the CRISPR gene-editing system for the treatment of psoriatic arthritis comprises one or more sgRNAs targeting exon 13 of eNFKB2. In some embodiments, the CRISPR gene-editing system for the treatment of psoriatic arthritis comprises one or more sgRNAs targeting exon 14 of eNFKB2. In some embodiments, the CRISPR gene-editing system for the treatment of psoriatic arthritis comprises one or more sgRNAs targeting exon 15 of eNFKB2. In some embodiments, the CRISPR gene-editing system for the treatment of psoriatic arthritis comprises one or more sgRNAs targeting exon 16 of eNFKB2. In some embodiments, the CRISPR gene-editing system for the treatment of psoriatic arthritis comprises one or more sgRNAs targeting exon 17 of eNFKB2. In some embodiments, the CRISPR gene-editing system for the treatment of psoriatic arthritis comprises one or more sgRNAs targeting exon 18 of eNFKB2. In some embodiments, the CRISPR gene-editing system for the treatment of psoriatic arthritis comprises one or more sgRNAs targeting exon 19 of eNFKB2. In some embodiments, the CRISPR gene-editing system for the treatment of psoriatic arthritis comprises one or more sgRNAs targeting exon 20 of eNFKB2. In some embodiments, the CRISPR gene-editing system for the treatment of psoriatic arthritis comprises one or more sgRNAs targeting exon 21 of eNFKB2. In some embodiments, the CRISPR gene-editing system for the treatment of psoriatic arthritis comprises one or more sgRNAs targeting exon 22 of eNFKB2. In some embodiments, the CRISPR gene-editing system for the treatment of psoriatic arthritis comprises one or more sgRNAs targeting exon 23 of eNFKB2.

[0119] In some embodiments, the CRISPR gene-editing system for the treatment of psoriatic arthritis comprises one or more sgRNAs targeting exon 1 of fNFKB2. In some embodiments, the CRISPR gene-editing system for the treatment of psoriatic arthritis comprises one or more sgRNAs targeting exon 2 of fNFKB2. In some embodiments, the CRISPR gene-editing system for the treatment of psoriatic arthritis comprises one or more sgRNAs targeting exon 3 of fNFKB2. In some embodiments, the CRISPR gene-editing system for the treatment of psoriatic arthritis comprises one or more sgRNAs targeting exon 4 of fNFKB2. In some embodiments, the CRISPR gene-editing system for the treatment of psoriatic arthritis comprises one or more sgRNAs targeting exon 5 of fNFKB2. In some embodiments, the CRISPR gene-editing system for the treatment of psoriatic arthritis comprises one or more sgRNAs targeting exon 6 of fNFKB2. In some embodiments, the CRISPR gene-editing system for the treatment of psoriatic arthritis comprises one or more sgRNAs targeting exon 7 of fNFKB2. In some embodiments, the CRISPR gene-editing system for the treatment of psoriatic arthritis comprises one or more sgRNAs targeting exon 8 of fNFKB2. In some embodiments, the CRISPR gene-editing system for the treatment of psoriatic arthritis comprises one or more sgRNAs targeting exon 9 of fNFKB2. In some embodiments, the CRISPR gene-editing system for the treatment of psoriatic arthritis comprises one or more sgRNAs targeting exon 10 of fNFKB2. In some embodiments, the CRISPR gene-editing system for the treatment of psoriatic arthritis comprises one or more sgRNAs targeting exon 11 of fNFKB2. In some embodiments, the CRISPR gene-editing system for the treatment of psoriatic arthritis comprises one or more sgRNAs targeting exon 12 of fNFKB2. In some embodiments, the CRISPR gene-editing system for the treatment of psoriatic arthritis comprises one or more sgRNAs targeting exon 13 of fNFKB2. In some embodiments, the CRISPR gene-editing system for the treatment of psoriatic arthritis comprises one or more sgRNAs targeting exon 14 of fNFKB2. In some embodiments, the CRISPR gene-editing system for the treatment of psoriatic arthritis comprises one or more sgRNAs targeting exon 15 of fNFKB2. In some embodiments, the CRISPR gene-editing system for the treatment of psoriatic arthritis comprises one or more sgRNAs targeting exon 16 of fNFKB2. In some embodiments, the CRISPR gene-editing system for the treatment of psoriatic arthritis comprises one or more sgRNAs targeting exon 17 of fNFKB2. In some embodiments, the CRISPR gene-editing system for the treatment of psoriatic arthritis comprises one or more sgRNAs targeting exon 18 of fNFKB2. In some embodiments, the CRISPR gene-editing system for the treatment of psoriatic arthritis comprises one or more sgRNAs targeting exon 19 of fNFKB2. In some embodiments, the CRISPR gene-editing system for the treatment of psoriatic arthritis comprises one or more sgRNAs targeting exon 20 of fNFKB2. In some embodiments, the CRISPR gene-editing system for the treatment of psoriatic arthritis comprises one or more sgRNAs targeting exon 21 of fNFKB2. In some embodiments, the CRISPR gene-editing system for the treatment of psoriatic arthritis comprises one or more sgRNAs targeting exon 22 of fNFKB2. In some embodiments, the CRISPR gene-editing system for the treatment of psoriatic arthritis comprises one or more sgRNAs targeting exon 23 of fNFKB2.

### D. Gout

[0120] In one aspect, the present disclosure encompasses treatments for gout and other crystallopathies affecting the joint, e.g., octacalcium phosphate and calcium pyrophosphate dihydrate in horses. In some embodiments, the gout treatment comprises a therapeutically effective amount of a Clustered Regularly Interspaced Short Palindromic Repeats (CRISPR) gene-editing system, the system comprising: (i) a CRISPR Associated (Cas) protein; and (ii) at least one guide RNA targeting NFKB1. In some embodiments, the gout treatment comprises a CRISPR gene-editing system targeting hNFKB1. In some embodiments, the gout treatment comprises a CRISPR gene-editing system targeting cNFKB1. In some embodiments, the gout treatment comprises a CRISPR gene-editing system targeting eNFKB1. In some embodiments, the gout treatment comprises a CRISPR gene-editing system targeting fNFKB1.

[0121] In some embodiments, the CRISPR gene-editing system for the treatment of gout comprises one or more sgRNAs targeting exon 1 of hNFKB1. In some embodiments, the CRISPR gene-editing system for the treatment of gout comprises one or more sgRNAs targeting exon 2 of hNFKB1. In some embodiments, the CRISPR gene-editing system for the treatment of gout comprises one or more sgRNAs targeting exon 3 of hNFKB1. In some embodiments, the CRISPR gene-editing system for the treatment of gout comprises one or more sgRNAs targeting exon 4 of hNFKB1. In some embodiments, the CRISPR gene-editing system for the treatment of gout comprises one or more sgRNAs targeting exon 5 of hNFKB1. In some embodiments, the CRISPR gene-editing system for the treatment of gout comprises one or more sgRNAs targeting exon 6 of hNFKB1. In some embodiments, the CRISPR gene-editing system for the treatment of gout comprises one or more sgRNAs targeting exon 7 of hNFKB1. In some embodiments, the CRISPR gene-editing system for the treatment of gout comprises one or more sgRNAs targeting exon 8 of hNFKB1. In some embodiments, the CRISPR gene-editing system for the treatment of gout comprises one or more sgRNAs targeting exon 9 of hNFKB1. In some embodiments, the CRISPR gene-editing system for the treatment of gout comprises one or more sgRNAs targeting exon 10 of hNFKB1. In some embodiments, the CRISPR gene-editing system for the treatment of gout comprises one or more sgRNAs targeting exon 11 of hNFKB1. In some embodiments, the CRISPR gene-editing system for the treatment of gout comprises one or more sgRNAs targeting exon 12 of hNFKB1. In some embodiments, the CRISPR gene-editing system for the treatment of gout comprises one or more sgRNAs targeting exon 13 of hNFKB1. In some embodiments, the CRISPR gene-editing system for the treatment of gout comprises one or more sgRNAs targeting exon 14 of hNFKB1. In some embodiments, the CRISPR gene-editing system for the treatment of gout comprises one or more sgRNAs targeting exon 15 of hNFKB1. In some embodiments, the CRISPR gene-editing system for the treatment of gout comprises one or more sgRNAs targeting exon 16 of hNFKB1. In some embodiments, the CRISPR gene-editing system for the treatment of gout comprises one or more sgRNAs targeting exon 17 of hNFKB1. In some embodiments, the CRISPR gene-editing system for the treatment of gout comprises one or more sgRNAs targeting exon 18 of hNFKB1. In some embodiments, the CRISPR gene-editing system for the treatment of gout comprises one or more sgRNAs targeting exon 19 of hNFKB1. In some embodiments, the CRISPR gene-editing system for the treatment of gout comprises one or more sgRNAs targeting exon 20 of hNFKB1. In some embodiments, the CRISPR gene-editing system for the treatment of gout comprises one or more sgRNAs targeting exon 21 of hNFKB1. In some embodiments, the CRISPR gene-editing system for the treatment of gout comprises one or more sgRNAs targeting exon 22 of hNFKB1. In some embodiments, the CRISPR gene-editing system for the treatment of gout comprises one or more sgRNAs targeting exon 23 of hNFKB1. In some embodiments, the CRISPR gene-editing system for the treatment of gout comprises one or more sgRNAs targeting exon 24 of hNFKB1. In some embodiments, the CRISPR gene-editing system for the treatment of gout comprises one or more sgRNAs targeting exon 25 of hNFKB1. In some embodiments, the CRISPR gene-editing system for the treatment of gout comprises one or more sgRNAs targeting exon 26 of hNFKB1. In some embodiments, the CRISPR gene-editing system for the treatment of gout comprises one or more sgRNAs targeting exon 27 of hNFKB1.

[0122] In some embodiments, the CRISPR gene-editing system for the treatment of gout comprises one or more sgRNAs targeting exon 1 of cNFKB1. In some embodiments, the CRISPR gene-editing system for the treatment of gout comprises one or more sgRNAs targeting exon 2 of cNFKB1. In some embodiments, the CRISPR gene-editing system for the treatment of gout comprises one or more sgRNAs targeting exon 3 of cNFKB1. In some embodiments, the CRISPR gene-editing system for the treatment of gout comprises one or more sgRNAs targeting exon 4 of cNFKB1. In some embodiments, the CRISPR gene-editing system for the treatment of gout comprises one or more sgRNAs targeting exon 5 of cNFKB1. In some embodiments, the CRISPR gene-editing system for the treatment of gout comprises one or more sgRNAs targeting exon 6 of cNFKB1. In some embodiments, the CRISPR gene-editing system for the treatment of gout comprises one or more sgRNAs targeting exon 7 of cNFKB1. In some embodiments, the CRISPR gene-editing system for the treatment of gout comprises one or more sgRNAs targeting exon 8 of cNFKB1. In some embodiments, the CRISPR gene-editing system for the treatment of gout comprises one or more sgRNAs targeting exon 9 of cNFKB1. In some embodiments, the CRISPR gene-editing system for the treatment of gout comprises one or more sgRNAs targeting exon 10 of cNFKB1. In some embodiments, the CRISPR gene-editing system for the treatment of gout comprises one or more sgRNAs targeting exon 11 of cNFKB1. In some embodiments, the CRISPR gene-editing system for the treatment of gout comprises one or more sgRNAs targeting exon 12 of cNFKB1. In some embodiments, the CRISPR gene-editing system for the treatment of gout comprises one or more sgRNAs targeting exon 13 of cNFKB1. In some embodiments, the CRISPR gene-editing system for the treatment of gout comprises one or more sgRNAs targeting exon 14 of cNFKB1. In some embodiments, the CRISPR gene-editing system for the treatment of gout comprises one or more sgRNAs targeting exon 15 of cNFKB1. In some embodiments, the CRISPR gene-editing system for the treatment of gout comprises one or more sgRNAs targeting exon 16 of cNFKB1. In some embodiments, the CRISPR gene-editing system for the treatment of gout comprises one or more sgRNAs targeting exon 17 of cNFKB1. In some embodiments, the CRISPR gene-editing system for the treatment of gout comprises one or more sgRNAs targeting exon 18 of cNFKB1. In some embodiments, the CRISPR gene-editing system for the treatment of gout comprises one or more sgRNAs targeting exon 19 of cNFKB1. In some embodiments, the CRISPR gene-editing system for the treatment of gout comprises one or more sgRNAs targeting exon 20 of cNFKB1. In some embodiments, the CRISPR gene-editing system for the treatment of gout comprises one or more sgRNAs targeting exon 21 of cNFKB1. In some embodiments, the CRISPR gene-editing system for the treatment of gout comprises one or more sgRNAs targeting exon 22 of cNFKB1. In some embodiments, the CRISPR gene-editing system for the treatment of gout comprises one or more sgRNAs targeting exon 23 of cNFKB1. In some embodiments, the CRISPR gene-editing system for the treatment of gout comprises one or more sgRNAs targeting exon 24 of cNFKB1. In some embodiments, the CRISPR gene-editing system for the treatment of gout comprises one or more sgRNAs targeting exon 25 of cNFKB1.

[0123] In some embodiments, the CRISPR gene-editing system for the treatment of gout comprises one or more sgRNAs targeting exon 1 of eNFKB1. In some embodiments, the CRISPR gene-editing system for the treatment of gout comprises one or more sgRNAs targeting exon 2 of eNFKB1. In some embodiments, the CRISPR gene-editing system for the treatment of gout comprises one or more sgRNAs targeting exon 3 of eNFKB1. In some embodiments, the CRISPR gene-editing system for the treatment of gout comprises one or more sgRNAs targeting exon 4 of eNFKB1. In some embodiments, the CRISPR gene-editing system for the treatment of gout comprises one or more sgRNAs targeting exon 5 of eNFKB1. In some embodiments, the CRISPR gene-editing system for the treatment of gout comprises one or more sgRNAs targeting exon 6 of eNFKB1. In some embodiments, the CRISPR gene-editing system for the treatment of gout comprises one or more sgRNAs targeting exon 7 of eNFKB1. In some embodiments, the CRISPR gene-editing system for the treatment of gout comprises one or more sgRNAs targeting exon 8 of eNFKB1. In some embodiments, the CRISPR gene-editing system for the treatment of gout comprises one or more sgRNAs targeting exon 9 of eNFKB1. In some embodiments, the CRISPR gene-editing system for the treatment of gout comprises one or more sgRNAs targeting exon 10 of eNFKB1. In some embodiments, the CRISPR gene-editing system for the treatment of gout comprises one or more sgRNAs targeting exon 11 of eNFKB1. In some embodiments, the CRISPR gene-editing system for the treatment of gout comprises one or more sgRNAs targeting exon 12 of eNFKB1. In some embodiments, the CRISPR gene-editing system for the treatment of gout comprises one or more sgRNAs targeting exon 13 of eNFKB1. In some embodiments, the CRISPR gene-editing system for the treatment of gout comprises one or more sgRNAs targeting exon 14 of eNFKB1. In some embodiments, the CRISPR gene-editing system for the treatment of gout comprises one or more sgRNAs targeting exon 15 of eNFKB1. In some embodiments, the CRISPR gene-editing system for the treatment of gout comprises one or more sgRNAs targeting exon 16 of eNFKB1. In some embodiments, the CRISPR gene-editing system for the treatment of gout comprises one or more sgRNAs targeting exon 17 of eNFKB1. In some embodiments, the CRISPR gene-editing system for the treatment of gout comprises one or more sgRNAs targeting exon 18 of eNFKB1. In some embodiments, the CRISPR gene-editing system for the treatment of gout comprises one or more sgRNAs targeting exon 19 of eNFKB1. In some embodiments, the CRISPR gene-editing system for the treatment of gout comprises one or more sgRNAs targeting exon 20 of eNFKB1. In some embodiments, the CRISPR gene-editing system for the treatment of gout comprises one or more sgRNAs targeting exon 21 of eNFKB1. In some embodiments, the CRISPR gene-editing system for the treatment of gout comprises one or more sgRNAs targeting exon 22 of eNFKB1. In some embodiments, the CRISPR gene-editing system for the treatment of gout comprises one or more sgRNAs targeting exon 23 of eNFKB1. In some embodiments, the CRISPR gene-editing system for the treatment of gout comprises one or more sgRNAs targeting exon 24 of eNFKB1. In some embodiments, the CRISPR gene-editing system for the treatment of gout comprises one or more sgRNAs targeting exon 25 of eNFKB1. In some embodiments, the CRISPR gene-editing system for the treatment of gout comprises one or more sgRNAs targeting exon 26 of eNFKB1. In some embodiments, the CRISPR gene-editing system for the treatment of gout comprises one or more sgRNAs targeting exon 27 of eNFKB1. In some embodiments, the CRISPR gene-editing system for the treatment of gout comprises one or more sgRNAs targeting exon 28 of eNFKB1.

[0124] In some embodiments, the CRISPR gene-editing system for the treatment of gout comprises one or more sgRNAs targeting exon 1 of fNFKB1. In some embodiments, the CRISPR gene-editing system for the treatment of gout comprises one or more sgRNAs targeting exon 2 of fNFKB1. In some embodiments, the CRISPR gene-editing system for the treatment of gout comprises one or more sgRNAs targeting exon 3 of fNFKB1. In some embodiments, the CRISPR gene-editing system for the treatment of gout comprises one or more sgRNAs targeting exon 4 of fNFKB1. In some embodiments, the CRISPR gene-editing system for the treatment of gout comprises one or more sgRNAs targeting exon 5 of fNFKB1. In some embodiments, the CRISPR gene-editing system for the treatment of gout comprises one or more sgRNAs targeting exon 6 of fNFKB1. In some embodiments, the CRISPR gene-editing system for the treatment of gout comprises one or more sgRNAs targeting exon 7 of fNFKB1. In some embodiments, the CRISPR gene-editing system for the treatment of gout comprises one or more sgRNAs targeting exon 8 of fNFKB1. In some embodiments, the CRISPR gene-editing system for the treatment of gout comprises one or more sgRNAs targeting exon 9 of fNFKB1. In some embodiments, the CRISPR gene-editing system for the treatment of gout comprises one or more sgRNAs targeting exon 10 of fNFKB1. In some embodiments, the CRISPR gene-editing system for the treatment of gout comprises one or more sgRNAs targeting exon 11 of fNFKB1. In some embodiments, the CRISPR gene-editing system for the treatment of gout comprises one or more sgRNAs targeting exon 12 of fNFKB1. In some embodiments, the CRISPR gene-editing system for the treatment of gout comprises one or more sgRNAs targeting exon 13 of fNFKB1. In some embodiments, the CRISPR gene-editing system for the treatment of gout comprises one or more sgRNAs targeting exon 14 of fNFKB1. In some embodiments, the CRISPR gene-editing system for the treatment of gout comprises one or more sgRNAs targeting exon 15 of fNFKB1. In some embodiments, the CRISPR gene-editing system for the treatment of gout comprises one or more sgRNAs targeting exon 16 of fNFKB1. In some embodiments, the CRISPR gene-editing system for the treatment of gout comprises one or more sgRNAs targeting exon 17 of fNFKB1. In some embodiments, the CRISPR gene-editing system for the treatment of gout comprises one or more sgRNAs targeting exon 18 of fNFKB1. In some embodiments, the CRISPR gene-editing system for the treatment of gout comprises one or more sgRNAs targeting exon 19 of fNFKB1. In some embodiments, the CRISPR gene-editing system for the treatment of gout comprises one or more sgRNAs targeting exon 20 of fNFKB1. In some embodiments, the CRISPR gene-editing system for the treatment of gout comprises one or more sgRNAs targeting exon 21 of fNFKB1. In some embodiments, the CRISPR gene-editing system for the treatment of gout comprises one or more sgRNAs targeting exon 22 of fNFKB1. In some embodiments, the CRISPR gene-editing system for the treatment of gout comprises one or more sgRNAs targeting exon 23 of fNFKB1. In some embodiments, the CRISPR gene-editing system for the treatment of gout comprises one or more sgRNAs targeting exon 24 of fNFKB1. In some embodiments, the CRISPR gene-editing system for the treatment of gout comprises one or more sgRNAs targeting exon 25 of fNFKB1.

[0125] In some embodiments, the CRISPR gene-editing system for the treatment of gout comprises one or more sgRNAs targeting NFKB2. In some embodiments, the CRISPR gene-editing system for the treatment of gout comprises one or more sgRNAs targeting hNFKB2. In some embodiments, the CRISPR gene-editing system for the treatment of gout comprises one or more sgRNAs targeting cNFKB2. In some embodiments, the CRISPR gene-editing system for the treatment of gout comprises one or more sgRNAs targeting eNFKB2. In some embodiments, the CRISPR gene-editing system for the treatment of gout comprises one or more sgRNAs targeting fNFKB2.

[0126] In some embodiments, the CRISPR gene-editing system for the treatment of gout comprises one or more sgRNAs targeting exon 1 of hNFKB2. In some embodiments, the CRISPR gene-editing system for the treatment of gout comprises one or more sgRNAs targeting exon 2 of hNFKB2. In some embodiments, the CRISPR gene-editing system for the treatment of gout comprises one or more sgRNAs targeting exon 3 of hNFKB2. In some embodiments, the CRISPR gene-editing system for the treatment of gout comprises one or more sgRNAs targeting exon 4 of hNFKB2. In some embodiments, the CRISPR gene-editing system for the treatment of gout comprises one or more sgRNAs targeting exon 5 of hNFKB2. In some embodiments, the CRISPR gene-editing system for the treatment of gout comprises one or more sgRNAs targeting exon 6 of hNFKB2. In some embodiments, the CRISPR gene-editing system for the treatment of gout comprises one or more sgRNAs targeting exon 7 of hNFKB2. In some embodiments, the CRISPR gene-editing system for the treatment of gout comprises one or more sgRNAs targeting exon 8 of hNFKB2. In some embodiments, the CRISPR gene-editing system for the treatment of gout comprises one or more sgRNAs targeting exon 9 of hNFKB2. In some embodiments, the CRISPR gene-editing system for the treatment of gout comprises one or more sgRNAs targeting exon 10 of hNFKB2. In some embodiments, the CRISPR gene-editing system for the treatment of gout comprises one or more sgRNAs targeting exon 11 of hNFKB2. In some embodiments, the CRISPR gene-editing system for the treatment of gout comprises one or more sgRNAs targeting exon 12 of hNFKB2. In some embodiments, the CRISPR gene-editing system for the treatment of gout comprises one or more sgRNAs targeting exon 13 of hNFKB2. In some embodiments, the CRISPR gene-editing system for the treatment of gout comprises one or more sgRNAs targeting exon 14 of hNFKB2. In some embodiments, the CRISPR gene-editing system for the treatment of gout comprises one or more sgRNAs targeting exon 15 of hNFKB2. In some embodiments, the CRISPR gene-editing system for the treatment of gout comprises one or more sgRNAs targeting exon 16 of hNFKB2. In some embodiments, the CRISPR gene-editing system for the treatment of gout comprises one or more sgRNAs targeting exon 17 of hNFKB2. In some embodiments, the CRISPR gene-editing system for the treatment of gout comprises one or more sgRNAs targeting exon 18 of hNFKB2. In some embodiments, the CRISPR gene-editing system for the treatment of gout comprises one or more sgRNAs targeting exon 19 of hNFKB2. In some embodiments, the CRISPR gene-editing system for the treatment of gout comprises one or more sgRNAs targeting exon 20 of hNFKB2. In some embodiments, the CRISPR gene-editing system for the treatment of gout comprises one or more sgRNAs targeting exon 21 of hNFKB2. In some embodiments, the CRISPR gene-editing system for the treatment of gout comprises one or more sgRNAs targeting exon 22 of hNFKB2. In some embodiments, the CRISPR gene-editing system for the treatment of gout comprises one or more sgRNAs targeting exon 23 of hNFKB2. In some embodiments, the CRISPR gene-editing system for the treatment of gout comprises one or more sgRNAs targeting exon 24 of hNFKB2.

[0127] In some embodiments, the CRISPR gene-editing system for the treatment of gout comprises one or more sgRNAs targeting exon 1 of cNFKB2. In some embodiments, the CRISPR gene-editing system for the treatment of gout comprises one or more sgRNAs targeting exon 2 of cNFKB2. In some embodiments, the CRISPR gene-editing system for the treatment of gout comprises one or more sgRNAs targeting exon 3 of cNFKB2. In some embodiments, the CRISPR gene-editing system for the treatment of gout comprises one or more sgRNAs targeting exon 4 of cNFKB2. In some embodiments, the CRISPR gene-editing system for the treatment of gout comprises one or more sgRNAs targeting exon 5 of cNFKB2. In some embodiments, the CRISPR gene-editing system for the treatment of gout comprises one or more sgRNAs targeting exon 6 of cNFKB2. In some embodiments, the CRISPR gene-editing system for the treatment of gout comprises one or more sgRNAs targeting exon 7 of cNFKB2. In some embodiments, the CRISPR gene-editing system for the treatment of gout comprises one or more sgRNAs targeting exon 8 of cNFKB2. In some embodiments, the CRISPR gene-editing system for the treatment of gout comprises one or more sgRNAs targeting exon 9 of cNFKB2. In some embodiments, the CRISPR gene-editing system for the treatment of gout comprises one or more sgRNAs targeting exon 10 of cNFKB2. In some embodiments, the CRISPR gene-editing system for the treatment of gout comprises one or more sgRNAs targeting exon 11 of cNFKB2. In some embodiments, the CRISPR gene-editing system for the treatment of gout comprises one or more sgRNAs targeting exon 12 of cNFKB2. In some embodiments, the CRISPR gene-editing system for the treatment of gout comprises one or more sgRNAs targeting exon 13 of cNFKB2. In some embodiments, the CRISPR gene-editing system for the treatment of gout comprises one or more sgRNAs targeting exon 14 of cNFKB2. In some embodiments, the CRISPR gene-editing system for the treatment of gout comprises one or more sgRNAs targeting exon 15 of cNFKB2. In some embodiments, the CRISPR gene-editing system for the treatment of gout comprises one or more sgRNAs targeting exon 16 of cNFKB2. In some embodiments, the CRISPR gene-editing system for the treatment of gout comprises one or more sgRNAs targeting exon 17 of cNFKB2. In some embodiments, the CRISPR gene-editing system for the treatment of gout comprises one or more sgRNAs targeting exon 18 of cNFKB2. In some embodiments, the CRISPR gene-editing system for the treatment of gout comprises one or more sgRNAs targeting exon 19 of cNFKB2. In some embodiments, the CRISPR gene-editing system for the treatment of gout comprises one or more sgRNAs targeting exon 20 of cNFKB2. In some embodiments, the CRISPR gene-editing system for the treatment of gout comprises one or more sgRNAs targeting exon 21 of cNFKB2. In some embodiments, the CRISPR gene-editing system for the treatment of gout comprises one or more sgRNAs targeting exon 22 of cNFKB2. In some embodiments, the CRISPR gene-editing system for the treatment of gout comprises one or more sgRNAs targeting exon 23 of cNFKB2.

[0128] In some embodiments, the CRISPR gene-editing system for the treatment of gout comprises one or more sgRNAs targeting exon 1 of eNFKB2. In some embodiments, the CRISPR gene-editing system for the treatment of gout comprises one or more sgRNAs targeting exon 2 of eNFKB2. In some embodiments, the CRISPR gene-editing system for the treatment of gout comprises one or more sgRNAs targeting exon 3 of eNFKB2. In some embodiments, the CRISPR gene-editing system for the treatment of gout comprises one or more sgRNAs targeting exon 4 of eNFKB2. In some embodiments, the CRISPR gene-editing system for the treatment of gout comprises one or more sgRNAs targeting exon 5 of eNFKB2. In some embodiments, the CRISPR gene-editing system for the treatment of gout comprises one or more sgRNAs targeting exon 6 of eNFKB2. In some embodiments, the CRISPR gene-editing system for the treatment of gout comprises one or more sgRNAs targeting exon 7 of eNFKB2. In some embodiments, the CRISPR gene-editing system for the treatment of gout comprises one or more sgRNAs targeting exon 8 of eNFKB2. In some embodiments, the CRISPR gene-editing system for the treatment of gout comprises one or more sgRNAs targeting exon 9 of eNFKB2. In some embodiments, the CRISPR gene-editing system for the treatment of gout comprises one or more sgRNAs targeting exon 10 of eNFKB2. In some embodiments, the CRISPR gene-editing system for the treatment of gout comprises one or more sgRNAs targeting exon 11 of eNFKB2. In some embodiments, the CRISPR gene-editing system for the treatment of gout comprises one or more sgRNAs targeting exon 12 of eNFKB2. In some embodiments, the CRISPR gene-editing system for the treatment of gout comprises one or more sgRNAs targeting exon 13 of eNFKB2. In some embodiments, the CRISPR gene-editing system for the treatment of gout comprises one or more sgRNAs targeting exon 14 of eNFKB2. In some embodiments, the CRISPR gene-editing system for the treatment of gout comprises one or more sgRNAs targeting exon 15 of eNFKB2. In some embodiments, the CRISPR gene-editing system for the treatment of gout comprises one or more sgRNAs targeting exon 16 of eNFKB2. In some embodiments, the CRISPR gene-editing system for the treatment of gout comprises one or more sgRNAs targeting exon 17 of eNFKB2. In some embodiments, the CRISPR gene-editing system for the treatment of gout comprises one or more sgRNAs targeting exon 18 of eNFKB2. In some embodiments, the CRISPR gene-editing system for the treatment of gout comprises one or more sgRNAs targeting exon 19 of eNFKB2. In some embodiments, the CRISPR gene-editing system for the treatment of gout comprises one or more sgRNAs targeting exon 20 of eNFKB2. In some embodiments, the CRISPR gene-editing system for the treatment of gout comprises one or more sgRNAs targeting exon 21 of eNFKB2. In some embodiments, the CRISPR gene-editing system for the treatment of gout comprises one or more sgRNAs targeting exon 22 of eNFKB2. In some embodiments, the CRISPR gene-editing system for the treatment of gout comprises one or more sgRNAs targeting exon 23 of eNFKB2.

[0129] In some embodiments, the CRISPR gene-editing system for the treatment of gout comprises one or more sgRNAs targeting exon 1 of fNFKB2. In some embodiments, the CRISPR gene-editing system for the treatment of gout comprises one or more sgRNAs targeting exon 2 of fNFKB2. In some embodiments, the CRISPR gene-editing system for the treatment of gout comprises one or more sgRNAs targeting exon 3 of fNFKB2. In some embodiments, the CRISPR gene-editing system for the treatment of gout comprises one or more sgRNAs targeting exon 4 of fNFKB2. In some embodiments, the CRISPR gene-editing system for the treatment of gout comprises one or more sgRNAs targeting exon 5 of fNFKB2. In some embodiments, the CRISPR gene-editing system for the treatment of gout comprises one or more sgRNAs targeting exon 6 of fNFKB2. In some embodiments, the CRISPR gene-editing system for the treatment of gout comprises one or more sgRNAs targeting exon 7 of fNFKB2. In some embodiments, the CRISPR gene-editing system for the treatment of gout comprises one or more sgRNAs targeting exon 8 of fNFKB2. In some embodiments, the CRISPR gene-editing system for the treatment of gout comprises one or more sgRNAs targeting exon 9 of fNFKB2. In some embodiments, the CRISPR gene-editing system for the treatment of gout comprises one or more sgRNAs targeting exon 10 of fNFKB2. In some embodiments, the CRISPR gene-editing system for the treatment of gout comprises one or more sgRNAs targeting exon 11 of fNFKB2. In some embodiments, the CRISPR gene-editing system for the treatment of gout comprises one or more sgRNAs targeting exon 12 of fNFKB2. In some embodiments, the CRISPR gene-editing system for the treatment of gout comprises one or more sgRNAs targeting exon 13 of fNFKB2. In some embodiments, the CRISPR gene-editing system for the treatment of gout comprises one or more sgRNAs targeting exon 14 of fNFKB2. In some embodiments, the CRISPR gene-editing system for the treatment of gout comprises one or more sgRNAs targeting exon 15 of fNFKB2. In some embodiments, the CRISPR gene-editing system for the treatment of gout comprises one or more sgRNAs targeting exon 16 of fNFKB2. In some embodiments, the CRISPR gene-editing system for the treatment of gout comprises one or more sgRNAs targeting exon 17 of fNFKB2. In some embodiments, the CRISPR gene-editing system for the treatment of gout comprises one or more sgRNAs targeting exon 18 of fNFKB2. In some embodiments, the CRISPR gene-editing system for the treatment of gout comprises one or more sgRNAs targeting exon 19 of fNFKB2. In some embodiments, the CRISPR gene-editing system for the treatment of gout comprises one or more sgRNAs targeting exon 20 of fNFKB2. In some embodiments, the CRISPR gene-editing system for the treatment of gout comprises one or more sgRNAs targeting exon 21 of fNFKB2. In some embodiments, the CRISPR gene-editing system for the treatment of gout comprises one or more sgRNAs targeting exon 22 of fNFKB2. In some embodiments, the CRISPR gene-editing system for the treatment of gout comprises one or more sgRNAs targeting exon 23 of fNFKB2.

### V. Delivery

### A. Viral Vectors

[0130] In one aspect, the present disclosure encompasses methods of delivery of a CRISPR gene-editing system targeting a gene selected from NFKB1, NFKB2, and combinations thereof using one or more recombinant viral particle. In some embodiments, the one of more viral vectors comprise a recombinant virus selected from a retrovirus, an adenovirus, an adeno-associated virus, a lentivirus, and a herpes simplex virus-1. In some embodiments, the one of more viral vectors comprise a recombinant adeno-associated virus (AAV). In some embodiments, the recombinant AAV is of serotype 5 (AAV5). In some embodiments, the recombinant AAV is of serotype 6 (AAV6). In some embodiments, the one or more viral vectors comprise: a first viral vector comprising a first nucleic acid, in the one or more nucleic acids, encoding the Cas protein; and a second viral vector comprising a second nucleic acid, in the one or more nucleic acids, encoding the at least one guide RNA. In some embodiments, the one or more viral vectors comprise a viral vector comprising a single nucleic acid, wherein the single nucleic acid encodes the Cas9 protein and the at least one guide RNA.

### 1. Adeno-Associated Virus (AAV)

[0131] A viral vector system useful for delivery of nucleic acids is the adeno-associated virus (AAV). Adeno-associated virus is a naturally occurring defective virus that requires another virus, such as an adenovirus or a herpes virus, as a helper virus for efficient replication and a productive life cycle. For a review see Muzyczka et al., Curr. Topics in Micro. and Immunol. 158:97-129 (1992). It is also one of the few viruses that may integrate its DNA into non-dividing cells, and exhibits a high frequency of stable integration (see for example Flotte et al., Am. J. Respir. Cell. Mol. Biol. 7:349-356 (1992); Samulski et al., J. Virol. 63:3822-3828 (1989); and McLaughlin et al., J. Virol. 62:1963-1973 (1989). Vectors containing as little as 300 base pairs of AAV can be packaged and can integrate. Space for exogenous DNA is limited to about 4.5 kb. An AAV vector such as that described in Tratschin et al., Mol. Cell. Biol. 5:3251-3260 (1985) can be used to introduce DNA into cells. A variety of nucleic acids have been introduced into different cell types using AAV vectors (see for example Hermonat et al., Proc. Natl. Acad. Sci. USA 81:6466-6470 (1984); Tratschin et al., Mol. Cell. Biol. 4:2072-2081 (1985); Wondisford et al., Mol. Endocrinol. 2:32-39 (1988); Tratschin et al., J. Virol. 51:611-619 (1984); and Flotte et al., J. Biol. Chem. 268:3781-3790 (1993). The identification of Staphylococcus aureus (SaCas9) and other smaller Cas9 enzymes that can be packaged into adeno-associated viral (AAV) vectors that are highly stable and effective in vivo, easily produced, approved by FDA, and tested in multiple clinical trials, paves new avenues for therapeutic gene editing.

[0132] According to particular embodiments, a CRISPR gene-editing system targeting a gene selected from NFKB1, NFKB2, and combinations thereof further comprise a recombinant AAV vector. In some embodiments, the CRISPR gene-editing system is encoded by a nucleic acid, wherein the nucleic acid is a recombinant AAV genome. In some embodiments, the AAV vector is selected from an AAV1 vector, an AAV2 vector, an AAV3 vector, an AAV4 vector, an AAV5 vector, an AAV6 vector, an AAV7 vector, an AAV8 vector, an AAV9 vector, and an AAV10 vector.

[0133] In some aspects, the AAV vector comprises a serotype selected from the group consisting of: AAV1, AAV1(Y705+731F+T492V), AAV2(Y444+500+730F+T491V), AAV3(Y705+731F), AAV4, AAV5, AAV5(Y436+693+719F), AAV6, AAV6 (VP3 variant Y705F/Y731F/T492V), AAV-7m8, AAV8, AAV8(Y733F), AAV9, AAV9 (VP3 variant Y731F), AAV10(Y733F), AAV-ShH10, and AAV-DJ/8. In some aspects, the AAV vector comprises a serotype selected from the group consisting of: AAV1, AAV5, AAV6, AAV6 (Y705F/Y731F/T492V), AAV8, AAV9, and AAV9 (Y731F).

[0134] In some embodiments, use of the CRISPR gene-editing system further comprising one or more LNPs to target a gene selected from NFKB1, NFKB2, and combinations thereof is therapeutic.

### 2. Lentivirus

[0135] In some aspects, the viral vector is a lentivirus. In an aspect, the lentivirus is selected from the group consisting of: human immunodeficiency-1 (HIV-1), human immunodeficiency-2 (HIV-2), simian immunodeficiency virus (SIV), feline immunodeficiency virus (FIV), bovine immunodeficiency virus (BIV), Jembrana Disease Virus (JDV), equine infectious anemia virus (EIAV), and caprine arthritis encephalitis virus (CAEV).

[0136] Lentiviral transduction systems are known in the art and are described, e.g., in Levine, et al., Proc. Nat'l Acad. Sci. 2006, 103, 17372-77; Zufferey, et al., Nat. Biotechnol. 1997, 15, 871-75; Dull, et al., J. Virology 1998, 72, 8463-71, and U.S. Pat. No. 6,627,442, the disclosures of each of which are incorporated by reference herein.

### B. Lipid Nanoparticles (LNP)

[0137] In some embodiments, a CRISPR gene-editing system is delivered by a nanoparticle. Without wishing to be bound by any particular theory, in certain embodiments, nucleic acids, when present in the nanoparticle, are resistant in aqueous solution to degradation with a nuclease. In other embodiments, proteins are protected from protease degradation. In some embodiments, proteins and nucleic acids encapsulated by nanoparticles are capable of penetrating the cellular plasma membrane.

[0138] Lipid nanoparticles comprising nucleic acids and their method of preparation is disclosed in at least WO2017/019935, WO2017/049074, WO2017/201346, WO2017/218704, WO2018/006052, WO2018/013525, WO2018/089540, WO2018/119115, WO2018/126084, WO2018/157009, WO2018/170336, WO2018/222890, WO2019/046809, WO2019/089828, WO2020/061284, WO2020/061317, WO2020/081938, WO2020/097511, WO2020/097520, WO2020/097540, WO2020/097548, WO2020/214946, WO2020/219941, WO2020/232276, WO2020/227615, WO2020/061295, WO2021/007278, WO2021/016430, WO2021/021988, EP Patent No. EP 2 972 360, US20200155691, US20200237671, U.S. Pat. Nos. 8,058,069, 8,492,359, 8,822,668, 9,364,435, 9,404,127, 9,504,651, 9,593,077, 9,738,593, 9,868,691, 9,868,692, 9,950,068, 10,138,213, 10,166,298, 10,221,127, 10,238,754, 10,266,485, 10,383,952, 10,730,924, 10,766,852, 11,079,379, 11,141,378 and 11,246,933, which are incorporated herein by reference in their entirety for all purposes.

### Lipid Nanoparticle Compositions

[0139] In some embodiments, the largest dimension of a nanoparticle composition is 1 micrometer or shorter (e.g., 1 micrometer, 900 nm, 800 nm, 700 nm, 600 nm, 500 nm, 400 nm, 300 nm, 200 nm, 175 nm, 150 nm, 125 nm, 100 nm, 75 nm, 50 nm, or shorter), e.g., when measured by dynamic light scattering (DLS), transmission electron microscopy, scanning electron microscopy, or another method. Nanoparticle compositions include, for example, lipid nanoparticles (LNPs), liposomes, lipid vesicles, and lipoplexes. In some embodiments, nanoparticle compositions are vesicles including one or more lipid bilayers. In certain embodiments, a nanoparticle composition includes two or more concentric bilayers separated by aqueous compartments. Lipid bilayers may be functionalized and/or crosslinked to one another. Lipid bilayers may include one or more ligands, proteins, or channels. In various embodiments, lipid nanoparticles described herein have a mean diameter of from about 30 nm to about 150 nm, from about 40 nm to about 150 nm, from about 50 nm to about 150 nm, from about 60 nm to about 130 nm, from about 70 nm to about 110 nm, from about 70 nm to about 100 nm, from about 80 nm to about 100 nm, from about 90 nm to about 100 nm, from about 70 nm to about 90 nm, from about 80 nm to about 90 nm, from about 70 nm to about 80 nm, or about 30 nm, 35 nm, 40 nm, 45 nm, 50 nm, 55 nm, 60 nm, 65 nm, 70 nm, 75 nm, 80 nm, 85 nm, 90 nm, 95 nm, 100 nm, 105 nm, 110 nm, 115 nm, 120 nm, 125 nm, 130 nm, 135 nm, 140 nm, 145 nm, or 150 nm, and are substantially non-toxic.

[0140] In certain embodiments, the lipid nanoparticles described herein comprise one or more components, including a lipid component, and (optionally) a structural component. The lipid component comprises lipids selected from ionizable and/or cationic lipids (i.e., lipids that may have a positive or partial positive charge at physiological pH), neutral lipids (e.g., phospholipids, or sphingolipids), and polymer-conjugated lipids (e.g., PEGylated lipids). In some embodiments, the lipid component comprises a single ionizable lipid. In other embodiments, the lipid component comprises 2, 3, 4, 5, 6, 7, 8, 9, 10, 15, or 20 ionizable lipids. In some embodiments, the lipid component comprises a single neutral lipid. In other embodiments, the lipid component comprises 2, 3, 4, 5, 6, 7, 8, 9, 10, 15, or 20 neutral lipids. In some embodiments, the lipid com-ponent comprises a single polymer-conjugated lipid. In other embodiments, the lipid component comprises 2, 3, 4, 5, 6, 7, 8, 9, 10, 15, or 20 polymer-conjugated lipids. In some embodiments, the structural component comprises a single structural lipid. In other embodiments, the structural component comprises 2, 3, 4, 5, 6, 7, 8, 9, 10, 15, or 20 structural lipids. In some embodiments, the lipid component comprises at least one cationic lipid, at least one neutral lipid, and at least one polymer-conjugated lipid. The present disclosure contemplates that the lipid component may comprise any combination of the foregoing constituents.

### Ionizable/Cationic Lipids

[0141] In some embodiments, the lipid component comprises an ionizable lipid. In some embodiments, the ionizable lipid is anionic. In other embodiments, the ionizable lipid is a cationic lipid. In some embodiments, the lipid component comprises cationic lipids including, but not limited to, a cationic lipid selected from the group consisting of 3-(didodecylamino)-N1,N1,4-tridodecyl-1-piperazineethanamine (KL10), N1-[2-(didodecylamino)ethyl]-N1,N4,N4-tridodecyl-1,4-piperazinediethanamine (KL22), 14,25-ditridecyl-15,18,21,24-tetraaza-octatriacontane (KL25), 1,2-dilinoleyloxy-N,N-dimethylaminopropane (DLin-DMA), 2,2-dilinoleyl-4-dimethylaminomethyl-[1,3]-dioxolane (DLin-K-DMA), heptatriaconta-6,9,28,31-tetraen-19-yl 4-(dimethylamino)butanoate (DLin-MC3-DMA), 2,2-dilinoleyl-4-(2-dimethylaminoethyl)-[1,3]-dioxolane (DLin-KC2-DMA), 1,2-dioleyloxy-N,N-dimethylaminopropane (DODMA), 2-({8-[(3.beta.)-cholest-5-en-3-yloxy]octyl}oxy)-N,N-dimethyl-3-[(9Z,12Z)—octadeca-9,12-dien-1-yloxy]propan-1-amine (Octyl-CLinDMA), (2R)-2-({8-[(3.beta.)-cholest-5-en-3-yloxy]octyl}oxy)-N,N-dimethyl-3-[(9Z-,12Z)-octadeca-9,12-dien-1-yloxy]propan-1-amine (Octyl-CLinDMA (2R)), (2S)-2-({8-[(3.beta.)-cholest-5-en-3-yloxy]octyl}oxy)-N,N-dimethyl-3-[(9Z-,12Z)-octadeca-9,12-dien-1-yloxy]propan-1-amine (Octyl-CLinDMA (2S)), a lipid including a cyclic amine group, and mixtures thereof.

### Non-Exhaustive and Non-Limiting Examples of Cationic Lipids Include:

[chemical structure]

[chemical structure]

[chemical structure]

[chemical structure]

[chemical structure]

[chemical structure]

### Neutral Lipids/Phospholipids

[0142] In some embodiments, the lipid component further comprises neutral lipids including, but not limited to, a phospholipid selected from the group consisting of 1,2-dilinoleoyl-sn-glycero-3-phosphocholine (DLPC), 1,2-dimyristoyl-sn-glycero-phosphocholine (DMPC), 1,2-dioleoyl-sn-glycero-3-phosphocholine (DOPC), 1,2-dipalmitoyl-sn-glycero-3-phosphocholine (DPPC), 1,2-distearoyl-sn-glycero-3-phosphocholine (DSPC), 1,2-diundecanoyl-sn-glycero-phosphocholine (DUPC), 1-palmitoyl-2-oleoyl-sn-glycero-3-phosphocholine (POPC), 1,2-di-O-octadecenyl-sn-glycero-3-phosphocholine (18:0 Diether PC), 1-oleoyl-2-cholesterylhemisuccinoyl-sn-glycero-3-phosphocholine (OChemsPC), 1-hexadecyl-sn-glycero-3-phosphocholine (C16 Lyso PC), 1,2-dilinolenoyl-sn-glycero-3-phosphocholine, 1,2-diarachidonoyl-sn-glycero-3-phosphocholine, 1,2-didocosahexaenoyl-sn-glycero-3-phosphocholine, 1,2-dioleoyl-sn-glycero-3-phosphoethanolamine (DOPE), 1,2-diphytanoyl-sn-glycero-3-phosphoethanolamine (ME 16.0 PE), 1,2-distearoyl-sn-glycero-3-phosphoethanolamine, 1,2-dilinoleoyl-sn-glycero-3-phosphoethanolamine, 1,2-dilinolenoyl-sn-glycero-3-phosphoethanolamine, 1,2-diarachidonoyl-sn-glycero-3-phosphoethanolamine, 1,2-didocosahexaenoyl-sn-glycero-3-phosphoethanolamine, 1,2-dioleoyl-sn-glycero-3-phospho-rac-(1-glycerol) sodium salt (DOPG), sphingomyelin (SM), and mixtures thereof.

### Polymer-Conjugated Lipids

[0143] In some embodiments, the lipid component further comprises polymer-conjugated lipids, including, but not limited to, a PEGylated lipid selected from the group consisting of PEG-modified phosphatidylethanolamines, PEG-modified phosphatidic acids, PEG-modified ceramides, PEG-modified dialkylamines, PEG-modified diacylglycerols, PEG-modified dialkylglycerols, and mixtures thereof. For example, a PEG lipid may be PEG-c-DOMG, PEG-DMG, PEG₂₀₀₀-c-DMG, PEG-DLPE, PEG-DMPE, PEG-DPPC, PEG-DMA or a PEG-DSPE lipid.

### Non-Exhaustive and Non-Limiting Examples of PEG Lipids Include:

[chemical structure]

### Structural Lipids/Sterols

[0144] In some embodiments, the LNP further comprises a structural component. See generally Patel, S., et al. (2020). Nature Communications, 11(1), 1-13. In some embodiments, the structural component comprises a sterol including, but not limited to, a sterol selected from the group consisting of cholesterol, fecosterol, stigmasterol, stigmastanol, sitosterol, (3-sitosterol, lupeol, betulin, ursolic acid, oleanolic acid, campesterol, fucosterol, brassicasterol, ergosterol, 9,11-dehydroergosterol, tomatidine, tomatine, α-tocopherol, and mixtures thereof. In other embodiments, the structural lipid includes cholesterol and a corticosteroid (e.g., prednisolone, dexamethasone, prednisone, and hydrocortisone), or a combination thereof.

### Non-Exhaustive and Non-Limiting Examples of Structural Lipids Include:

[chemical structure]

### Formulations

[0145] Nanoparticle compositions may include a lipid component and one or more additional components, such as a therapeutic and/or prophylactic. A nanoparticle composition may be designed for one or more specific applications or targets. The elements of a nanoparticle composition may be selected based on a particular application or target, and/or based on the efficacy, toxicity, expense, ease of use, availability, or other feature of one or more elements. Similarly, the particular formulation of a nanoparticle composition may be selected for a particular application or target according to, for example, the efficacy and toxicity of particular combinations of elements.

[0146] The lipid component of a nanoparticle composition may include, for example, a cationic lipid, a phospholipid (such as an unsaturated lipid, e.g., DOPE or DSPC), a PEG lipid, and a structural lipid. The elements of the lipid component may be provided in specific fractions.

[0147] In some embodiments, the lipid component of a nanoparticle composition includes an ionizable lipid, a phospholipid, a PEG lipid, and a structural lipid. In certain embodiments, the lipid com-ponent of the nanoparticle composition includes about 30 mol % to about 60 mol % ionizable lipid, about 0 mol % to about 30 mol % phospholipid, about 0 mol % to about 10 mol % of PEG lipid, and about 17.5 mol % to about 50 mol % structural lipid, provided that the total mol % does not exceed 100%. In some embodiments, the lipid component of the nanoparticle composition includes about 35 mol % to about 55 mol % compound of ionizable lipid, about 5 mol % to about 25 mol % phospholipid, about 0 mol % to about 10 mol % of PEG lipid, and about 30 mol % to about 40 mol % structural lipid. In a particular embodiment, the lipid component includes about 50 mol % said compound, about 10 mol % phospholipid, about 38.5 mol % structural lipid, and about 1.5 mol % of PEG lipid. In another embodiment, the lipid component includes about 40 mol % said compound, about 20 mol % phospholipid, about 38.5 mol % structural lipid, and about 1.5 mol % of PEG lipid. In some embodiments, the phospholipid may be DOPE or DSPC. In other embodiments, the PEG lipid may be PEG-DMG and/or the structural lipid may be cholesterol.

[0148] In some embodiments, the ionizable lipids comprise between about 20 and about 60 mol % of the lipid component. In other embodiments, the ionizable lipids comprise between about 35 and about 55 mol % of the lipid component. In various embodiments, the ionizable lipids comprise about 20, 21, 22, 23, 24, 25, 26, 27, 28, 29, 30, 35, 40, 45, 50, 55, or 60 mol % of the lipid component.

[0149] In some embodiments, the neutral lipids comprise between about 0 and about 30 mol % of the lipid component. In other embodiments, the neutral lipids comprise between about 5 and about 25 mol % of the lipid component. In various embodiments, the neutral lipids comprise about 1, 2, 3, 4, 5, 6, 7, 8, 9, 10, 11, 12, 13, 14, 15, 16, 17, 18, 19, 20, 25, or 30 mol % of the lipid component.

[0150] In some embodiments, the polymer-conjugated lipids comprise between about 0 and about 15 mol % of the lipid component. In other embodiments, the polymer-conjugated lipids comprise between about 0.5 and about 10 mol % of the lipid component. In various embodiments, the polymer-conjugated lipids comprise about 0.5, 1, 1.5, 2, 2.5, 3, 3.5, 4, 4.5, 5, 5.5, 6, 6.5, 7, 7.5, 8, 8.5 9, 9.5, 10, or 15 mol % of the lipid component.

[0151] In some embodiments, the structural component comprises about 17.5 mol % to about 50 mol % of the lipid component. In other embodiments, the structural component comprises about 30 to about 40 mol % of the lipid component. In various embodiments, the structural component comprises about 17.5, 20, 22.5, 25, 27.5, 30, 31, 32, 33, 34, 35, 36, 37, 38, 39, 40, 41, 42, 43, 44, 45, 46, 47, 48, 49, or 50 mol % of the lipid component.

[0152] The structural component may alternatively be expressed as a ratio relative to the lipid component. In some embodiments, the structural component is in a ratio of about 1:1 with the lipid component (sterol:lipids). In other embodiments, the structural component is in a ratio of about 1:5 with the lipid component (sterol:lipids). In various embodiments, the structural component is in a ratio of about 1:1, 1:2, 1:3, 1:4, 1:5, 1:6, 1:7, 1:8, 1:9, 1:10, 1:15, 1:20, or 1:25 with the lipid component (sterol:lipids).

[0153] Nanoparticle compositions may be designed for one or more specific applications or targets. For example, a nanoparticle composition may be designed to deliver a therapeutic and/or prophylactic such as an RNA to a particular cell, tissue, organ, or system or group thereof in a mammal's body. Physiochemical properties of nanoparticle compositions may be altered in order to increase selectivity for particular bodily targets. For instance, particle sizes may be adjusted based on the fenestration sizes of different organs. The therapeutic and/or prophylactic included in a nanoparticle composition may also be selected based on the desired delivery target or targets. For example, a therapeutic and/or prophylactic may be selected for a particular indication, condition, disease, or disorder and/or for delivery to a particular cell, tissue, organ, or system or group thereof (e.g., localized or specific delivery). In certain embodiments, a nanoparticle composition may include an mRNA encoding a polypeptide of interest capable of being translated within a cell to produce the polypeptide of interest. Such a composition may be designed to be specifically delivered to a particular organ. In some embodiments, a composition may be de-signed to be specifically delivered to a mammalian joint.

[0154] The amount of a therapeutic and/or prophylactic in a nanoparticle composition may depend on the size, composition, desired target and/or application, or other properties of the nanoparticle composition as well as on the properties of the therapeutic and/or prophylactic. For example, the amount of an RNA useful in a nanoparticle composition may depend on the size, sequence, and other characteristics of the RNA. The relative amounts of a therapeutic and/or prophylactic and other elements (e.g., lipids) in a nanoparticle composition may also vary. In some embodiments, the wt/wt ratio of the lipid component to a therapeutic and/or prophylactic in a nanoparticle composition may be from about 5:1 to about 60:1, such as 5:1, 6:1, 7:1, 8:1, 9:1, 10:1, 11:1, 12:1, 13:1, 14:1, 15:1, 16:1, 17:1, 18:1, 19:1, 20:1, 25:1, 30:1, 35:1, 40:1, 45:1, 50:1, and 60:1. For example, the wt/wt ratio of the lipid component to a therapeutic and/or prophylactic may be from about 10:1 to about 40:1. In certain embodiments, the wt/wt ratio is about 20:1. The amount of a therapeutic and/or prophylactic in a nanoparticle composition may, for example, be measured using absorption spectroscopy (e.g., ultraviolet-visible spectroscopy).

[0155] In some embodiments, the therapeutic and/or prophylactic comprises a nucleic acid component. In some embodiments, the nucleic acid component comprises RNA including, but not limited to, RNA selected from the group consisting of messenger RNA (mRNA), CRISPR RNA (crRNA), tracrRNA, single-guide RNA (sgRNA), short interfering RNA (siRNA), antisense oligonucleotides (ASO), and mixtures thereof. In other embodiments, the nucleic acid component comprises DNA including, but not limited to, DNA selected from the group consisting of linear DNA, plasmid DNA, antisense oligonucleotide, and mixtures thereof.

[0156] In some embodiments, a nanoparticle composition includes one or more RNAs, and the one or more RNAs, lipids, and amounts thereof may be selected to provide a specific N:P ratio. The N:P ratio of the composition refers to the molar ratio of nitrogen atoms in one or more lipids to the number of phosphate groups in an RNA. In general, a lower N:P ratio is preferred. The one or more RNA, lipids, and amounts thereof may be selected to provide an N:P ratio from about 2:1 to about 30:1, such as 2:1, 3:1, 4:1, 5:1, 6:1, 7:1, 8:1, 9:1, 10:1, 12:1, 14:1, 16:1, 18:1, 20:1, 22:1, 24:1, 26:1, 28:1, or 30:1. In certain embodiments, the N:P ratio may be from about 2:1 to about 8:1. In other embodiments, the N:P ratio is from about 5:1 to about 8:1. For example, the N:P ratio may be about 5.0:1, about 5.5:1, about 5.67:1, about 6.0:1, about 6.5:1, or about 7.0:1. For example, the N:P ratio may be about 5.67:1.

[0157] In some embodiments, the nucleic acid component is comprised of a modified nucleic acid. For example, an RNA may be a modified RNA. That is, an RNA may include one or more nucleobases, nucleosides, nucleotides, or linkers that are non-naturally occurring. A “modified” species may also be referred to herein as an “altered” species. Species may be modified or altered chemically, structurally, or functionally. For example, a modified nucleobase species may include one or more substitutions that are not naturally occurring.

### Physical Properties

[0158] The characteristics of a nanoparticle composition may depend on the components thereof. For example, a nanoparticle composition including cholesterol as a structural lipid may have different characteristics than a nanoparticle composition that includes a different structural lipid. Similarly, the characteristics of a nanoparticle composition may depend on the absolute or relative amounts of its components. For instance, a nanoparticle composition including a higher molar fraction of a phospholipid may have different characteristics than a nanoparticle composition including a lower molar fraction of a phospholipid. Characteristics may also vary depending on the method and conditions of preparation of the nanoparticle composition.

[0159] Nanoparticle compositions may be characterized by a variety of methods. For example, microscopy (e.g., transmission electron microscopy or scanning electron microscopy) may be used to examine the morphology and size distribution of a nanoparticle composition. Dynamic light scattering or potentiometry (e.g., potentiometric titrations) may be used to measure zeta potentials. Dynamic light scattering may also be utilized to determine particle sizes. Instruments such as the Zetasizer Nano ZS (Malvem Instruments Ltd, Malvern, Worcestershire, UK) may also be used to measure multiple characteristics of a nanoparticle composition, such as particle size, polydispersity index, and zeta potential.

[0160] The mean size of a nanoparticle composition may be between 10 nm and 1 micrometer, e.g., measured by dynamic light scattering (DLS). For example, the mean size may be from about 40 nm to about 150 nm, such as about 40 nm, 45 nm, 50 nm, 55 nm, 60 nm, 65 nm, 70 nm, 75 nm, 80 nm, 85 nm, 90 nm, 95 nm, 100 nm, 105 nm, 110 nm, 115 nm, 120 nm, 125 nm, 130 nm, 135 nm, 140 nm, 145 nm, or 150 nm. In some embodiments, the mean size of a nanoparticle composition may be from about 50 nm to about 100 nm, from about 50 nm to about 90 nm, from about 50 nm to about 80 nm, from about 50 nm to about 70 nm, from about 50 nm to about 60 nm, from about 60 nm to about 100 nm, from about 60 nm to about 90 nm, from about 60 nm to about 80 nm, from about 60 nm to about 70 nm, from about 70 nm to about 100 nm, from about 70 nm to about 90 nm, from about 70 nm to about 80 nm, from about 80 nm to about 100 nm, from about 80 nm to about 90 nm, or from about 90 nm to about 100 nm. In certain embodiments, the mean size of a nanoparticle composition may be from about 70 nm to about 100 nm. In a particular embodiment, the mean size may be about 80 nm. In other embodiments, the mean size may be about 100 nm.

[0161] A nanoparticle composition may be relatively homogenous. A polydispersity index may be used to indicate the homogeneity of a nanoparticle composition, e.g., the particle size distribution of the nanoparticle compositions. A small (e.g., less than 0.3) polydispersity index generally indicates a narrow particle size distribution. A nanoparticle composition may have a polydispersity index from about 0 to about 0.25, such as 0.01, 0.02, 0.03, 0.04, 0.05, 0.06, 0.07, 0.08, 0.09, 0.10, 0.11, 0.12, 0.13, 0.14, 0.15, 0.16, 0.17, 0.18, 0.19, 0.20, 0.21, 0.22, 0.23, 0.24, or 0.25. In some embodiments, the polydispersity index of a nanoparticle composition may be from about 0.10 to about 0.20.

[0162] The zeta potential of a nanoparticle composition may be used to indicate the electrokinetic potential of the composition. For example, the zeta potential may describe the surface charge of a nanoparticle composition. Nanoparticle compositions with relatively low charges, positive or negative, are generally desirable, as more highly charged species may interact undesirably with cells, tissues, and other elements in the body. In some embodiments, the zeta potential of a nanoparticle composition may be from about −10 mV to about +20 mV, from about −10 mV to about +15 mV, from about −10 mV to about +10 mV, from about −10 mV to about +5 mV, from about −10 mV to about 0 mV, from about −10 mV to about −5 mV, from about −5 mV to about +20 mV, from about −5 mV to about +15 mV, from about −5 mV to about +10 mV, from about −5 mV to about +5 mV, from about −5 mV to about 0 mV, from about 0 mV to about +20 mV, from about 0 mV to about +15 mV, from about 0 mV to about +10 mV, from about 0 mV to about +5 mV, from about +5 mV to about +20 mV, from about +5 mV to about +15 mV, or from about +5 mV to about +10 mV.

[0163] The efficiency of encapsulation of a therapeutic and/or prophylactic describes the amount of therapeutic and/or prophylactic that is encapsulated or otherwise associated with a nanoparticle composition after preparation, relative to the initial amount provided. The encapsulation efficiency is desirably high (e.g., close to 100%). The encapsulation efficiency may be measured, for example, by comparing the amount of therapeutic and/or prophylactic in a solution containing the nanoparticle composition before and after breaking up the nanoparticle composition with one or more organic solvents or detergents. Fluorescence may be used to measure the amount of free therapeutic and/or prophylactic (e.g., RNA) in a solution. For the nanoparticle compositions described herein, the encapsulation efficiency of a therapeutic and/or prophylactic may be at least 50%, for example 50%, 55%, 60%, 65%, 70%, 75%, 80%, 85%, 90%, 91%, 92%, 93%, 94%, 95%, 96%, 97%, 98%, 99%, or 100%. In some embodiments, the encapsulation efficiency may be at least 80%. In certain embodiments, the encapsulation efficiency may be at least 90%.

[0164] A nanoparticle composition may optionally comprise one or more coatings. For example, a nanoparticle composition may be formulated in a capsule, film, or tablet having a coating. A capsule, film, or tablet including a composition described herein may have any useful size, tensile strength, hardness, or density.

[0165] Unless otherwise defined, all technical and scientific terms used herein have the same meaning as commonly understood by one of ordinary skill in the art to which this disclosure belongs. Although methods and materials similar or equivalent to those described herein may be used in the practice or testing of the present disclosure, suitable methods and materials are described below. All publications, patent applications, patents, and other references mentioned herein are incorporated by reference in their entirety. In addition, the materials, methods, and examples are illustrative only and not intended to be limiting.

[0166] In some embodiments, the CRISPR gene-editing system comprises one or more RNA-containing compositions. In some embodiments, the CRISPR gene-editing system further comprises one or more nanoparticles. In some embodiments, said one or more RNA-containing compositions comprises a guide RNA. In some embodiments, said one or more RNA-containing compositions comprises an mRNA. In some embodiments, said one or more RNA-containing compositions comprises an RNP (e.g., Cas9 and a guide RNA). In some embodiments, said one or more nanoparticles are lipid nanoparticles (LNP).

[0167] In some embodiments, the CRISPR gene-editing system comprises one or more LNPs collectively encapsulating (i) the RNA-guided nuclease or the nucleic acid encoding the RNA-guided nuclease and (ii) the at least one guide RNA or the nucleic acid encoding the at least one guide RNA. In some embodiments, the one or more LNPs comprises a first plurality of LNP encapsulating the RNA-guided nuclease or a nucleic acid encoding an RNA-guided nuclease and a second plurality of LNP encapsulating the at least one guide RNA or a nucleic acid encoding at least one guide RNA.

[0168] In some embodiments, the one or more LNP comprises a component selected from the group consisting of 3-(didodecylamino)-N1,N1,4-tridodecyl-1-piperazineethanamine (KL10), N1-[2-(didodecylamino)ethyl]-N1,N4,N4-tridodecyl-1,4-piperazinediethanamine (KL22), 14,25-ditridecyl-15,18,21,24-tetraaza-octatriacontane (KL25), 1,2-dilinoleyloxy-N,N-dimethylaminopropane (DLin-DMA), 2,2-dilinoleyl-4-dimethylaminomethyl-[1,3]-dioxolane (DLin-K-DMA), heptatriaconta-6,9,28,31-tetraen-19-yl 4-(dimethylamino)butanoate (DLin-MC3-DMA), 2,2-dilinoleyl-4-(2-dimethylaminoethyl)-[1,3]-dioxolane (DLin-KC2-DMA), 1,2-dioleyloxy-N,N-dimethylaminopropane (DODMA), 2-({8-[(3.beta.)-cholest-5-en-3-yloxy]octyl}oxy)-N,N-dimethyl-3-[(9Z,12Z)—octadeca-9,12-dien-1-yloxy]propan-1-amine (Octyl-CLinDMA), (2R)-2-({8-[(3.beta.)-cholest-5-en-3-yloxy]octyl}oxy)-N,N-dimethyl-3-[(9Z-,12Z)-octadeca-9,12-dien-1-yloxy]propan-1-amine (Octyl-CLinDMA (2R)), (2S)-2-({8-[(3.beta.)-cholest-5-en-3-yloxy]octyl}oxy)-N,N-dimethyl-3-[(9Z-,12Z)-octadeca-9,12-dien-1-yloxy]propan-1-amine (Octyl-CLinDMA (2S)), a lipid including a cyclic amine group, and a mixture thereof.

[0169] In some embodiments, the one or more LNP comprises a component selected from the group consisting of 1,2-dilinoleoyl-sn-glycero-3-phosphocholine (DLPC), 1,2-dimyristoyl-sn-glycero-phosphocholine (DMPC), 1,2-dioleoyl-sn-glycero-3-phosphocholine (DOPC), 1,2-dipalmitoyl-sn-glycero-3-phosphocholine (DPPC), 1,2-distearoyl-sn-glycero-3-phosphocholine (DSPC), 1,2-diundecanoyl-sn-glycero-phosphocholine (DUPC), 1-palmitoyl-2-oleoyl-sn-glycero-3-phosphocholine (POPC), 1,2-di-O-octadecenyl-sn-glycero-3-phosphocholine (18:0 Diether PC), 1-oleoyl-2-cholesterylhemisuccinoyl-sn-glycero-3-phosphocholine (OChemsPC), 1-hexadecyl-sn-glycero-3-phosphocholine (C16 Lyso PC), 1,2-dilinolenoyl-sn-glycero-3-phosphocholine, 1,2-diarachidonoyl-sn-glycero-3-phosphocholine, 1,2-didocosahexaenoyl-sn-glycero-3-phosphocholine, 1,2-dioleoyl-sn-glycero-3-phosphoethanolamine (DOPE), 1,2-diphytanoyl-sn-glycero-3-phosphoethanolamine (ME 16.0 PE), 1,2-distearoyl-sn-glycero-3-phosphoethanolamine, 1,2-dilinoleoyl-sn-glycero-3-phosphoethanolamine, 1,2-dilinolenoyl-sn-glycero-3-phosphoethanolamine, 1,2-diarachidonoyl-sn-glycero-3-phosphoethanolamine, 1,2-didocosahexaenoyl-sn-glycero-3-phosphoethanolamine, 1,2-dioleoyl-sn-glycero-3-phospho-rac-(1-glycerol) sodium salt (DOPG), sphingomyelin (SM), and a mixture thereof.

[0170] In some embodiments, the one or more LNP comprises a component selected from the group consisting of PEG-modified phosphatidylethanolamines, PEG-modified phosphatidic acids, PEG-modified ceramides, PEG-modified dialkylamines, PEG-modified diacylglycerols, PEG-modified dialkylglycerols, and mixtures thereof. For example, a PEG lipid may be PEG-c-DOMG, PEG-DMG, PEG-DLPE, PEG-DMPE, PEG-DPPC, PEG-DMA, a PEG-DSPE lipid, and a mixture thereof.

[0171] In some embodiments, the one or more LNP comprises a component selected from the group consisting of a cholesterol, fecosterol, stigmasterol, stigmastanol, sitosterol, (3-sitosterol, lupeol, betulin, ursolic acid, oleanolic acid, campesterol, fucosterol, brassicasterol, ergosterol, 9,11-dehydroergosterol, tomatidine, tomatine, α-tocopherol, and a mixture thereof.

[0172] In some embodiments, use of the CRISPR gene-editing system further comprising one or more LNPs to target a gene selected from NFKB1, NFKB2, and combinations thereof is therapeutic.

### C. Virus-Like Particles

[0173] In one aspect, the present disclosure encompasses means for delivering a CRISPR gene-editing system to a mammalian cell via a virus-like particle (VLP). In some embodiments, a CRISPR gene-editing system is delivered by a VLP. Without wishing to be bound by any particular theory, in certain embodiments, nucleic acids, when present in the particle, are resistant in aqueous solution to degradation with a nuclease. In other embodiments, proteins are protected from protease degradation while present in the particle. In some embodiments, proteins and nucleic acids encapsulated by VLPs are capable of penetrating the cellular plasma membrane.

[0174] In some embodiments, the CRISPR gene-editing system comprises one or more RNA-containing compositions. In some embodiments, the CRISPR gene-editing system further comprises one or more VLPs. In some embodiments, said one or more RNA-containing compositions comprises a guide RNA. In some embodiments, said one or more RNA-containing compositions comprises an mRNA. In some embodiments, said one or more RNA-containing compositions comprises an RNP (e.g., Cas9 and a guide RNA).

[0175] In some embodiments, the CRISPR gene-editing system comprises one or more virus-like particles collectively encapsulating (i) the RNA-guided nuclease or the nucleic acid encoding the RNA-guided nuclease and (ii) the at least one guide RNA or the nucleic acid encoding the at least one guide RNA. In some embodiments, the one or more virus-like particles comprises a first plurality of virus-like particles encapsulating the RNA-guided nuclease or a nucleic acid encoding an RNA-guided nuclease and a second plurality of virus-like particles encapsulating the at least one guide RNA or a nucleic acid encoding at least one guide RNA.

[0176] In some embodiments, use of the CRISPR gene-editing system further comprising one or more LNPs to target a gene selected from NFKB1, NFKB2, and combinations thereof is therapeutic.

### D. Miscellaneous Modes of Delivery

### 1. Liposomes

[0177] In some embodiments, nucleic acids encoding a CRISPR gene-editing system targeting a gene selected from NFKB1, NFKB2, and combinations thereof (e.g., Cas9 or gRNA) are entrapped in liposomes bearing positive charges on their surface (e.g., lipofectins), which can be tagged with antibodies against cell surface antigens of the target cells. These delivery vehicles can also be used to deliver Cas9 protein/gRNA complexes.

[0178] In some embodiments, the CRISPR gene-editing system comprises one or more RNA-containing compositions. In some embodiments, the CRISPR gene-editing system further comprises one or more liposomes. In some embodiments, said one or more RNA-containing compositions comprises a guide RNA. In some embodiments, said one or more RNA-containing compositions comprises an mRNA. In some embodiments, said one or more RNA-containing compositions comprises an RNP (e.g., Cas9 and a guide RNA).

[0179] In some embodiments, wherein the composition comprises one or more liposomes collectively encapsulating (i) the RNA-guided nuclease or the nucleic acid encoding the RNA-guided nuclease and (ii) the at least one guide RNA or the nucleic acid encoding the at least one guide RNA. In some embodiments, the one or more liposomes comprises a first plurality of liposomes encapsulating the RNA-guided nuclease or a nucleic acid encoding an RNA-guided nuclease and a second plurality of liposomes encapsulating the at least one guide RNA or a nucleic acid encoding at least one guide RNA.

[0180] In some embodiments, use of the CRISPR gene-editing system further comprising one or more LNPs to target a gene selected from NFKB1, NFKB2, and combinations thereof is therapeutic.

### 2. Lipid Nanocrystals (LNC)

[0181] In one aspect, the In one aspect, the present disclosure encompasses means for delivering a CRISPR gene-editing system to a mammalian cell via a lipid nanocrystal (LNC). In some embodiments, a CRISPR gene-editing system is delivered by a LNC. Without wishing to be bound by any particular theory, in certain embodiments, nucleic acids, when present in the nanocrystal, are resistant in aqueous solution to degradation with a nuclease. In other embodiments, proteins are protected from protease degradation while present in the nanocrystal. In some embodiments, proteins and nucleic acids encapsulated by nanocrystal are capable of penetrating the cellular plasma membrane.

[0182] In some embodiments, the CRISPR gene-editing system comprises one or more RNA-containing compositions. In some embodiments, the CRISPR gene-editing system further comprises one or more nanocrystals. In some embodiments, said one or more RNA-containing compositions comprises a guide RNA. In some embodiments, said one or more RNA-containing compositions comprises an mRNA. In some embodiments, said one or more RNA-containing compositions comprises an RNP (e.g., Cas9 and a guide RNA). In some embodiments, said one or more nanocrystals are lipid nanocrystals (LNC).

[0183] In some embodiments, the CRISPR gene-editing system comprises one or more LNCs collectively encapsulating (i) the RNA-guided nuclease or the nucleic acid encoding the RNA-guided nuclease and (ii) the at least one guide RNA or the nucleic acid encoding the at least one guide RNA. In some embodiments, the one or more LNCs comprises a first plurality of LNC encapsulating the RNA-guided nuclease or a nucleic acid encoding an RNA-guided nuclease and a second plurality of LNC encapsulating the at least one guide RNA or a nucleic acid encoding at least one guide RNA.

[0184] In some embodiments, use of the CRISPR gene-editing system further comprising one or more LNPs to target a gene selected from NFKB1, NFKB2, and combinations thereof is therapeutic.

### VI. Pharmaceutical Compositions

[0185] In one aspect, the present disclosure encompasses pharmaceutical compositions comprising a CRISPR gene-editing system for treatment of a mammal in need thereof. In some embodiments, the CRISPR gene-editing system targets a gene selected from NFKB1, NFKB2, and combinations thereof. In some embodiments, the mammal is selected from a human, a dog, a horse, and a cat.

[0186] In some embodiments, the pharmaceutical composition comprising a CRISPR gene-editing system targets NFKB1. In some embodiments, the CRISPR gene-editing system targeting NFKB1 is delivered to a mammalian cell via viral vector. In some embodiments, the CRISPR gene-editing system targeting NFKB1 is delivered to a mammalian cell via an AAV vector. In some embodiments, the CRISPR gene-editing system targeting NFKB1 is delivered to a mammalian cell via a lentiviral vector. In some embodiments, the CRISPR gene-editing system targeting NFKB1 is delivered to a mammalian cell via a lipid nanoparticle. In some embodiments, the CRISPR gene-editing system targeting NFKB1 is delivered to a mammalian cell via a virus-like particle. In some embodiments, the CRISPR gene-editing system targeting NFKB1 is delivered to a mammalian cell via a liposome. In some embodiments, the CRISPR gene-editing system targeting NFKB1 is delivered to a mammalian cell via a lipid nanocrystal.

[0187] In some embodiments, the disclosure provides a pharmaceutical composition for treating or preventing a joint disorder, comprising: (i) an RNA-guided nuclease or a nucleic acid encoding an RNA-guided nuclease; and (ii) at least one guide RNA or a nucleic acid encoding at least one guide RNA targeting a gene associated with the production, blocking, or removal of reactive oxygen species (ROS).

[0188] In some embodiments, the joint disorder is arthritis.

[0189] In some embodiments, the joint disorder is osteoarthritis.

[0190] In some embodiments, the joint disorder is rheumatoid arthritis.

[0191] In some embodiments, the joint disorder is post-traumatic arthritis.

[0192] In some embodiments, the joint disorder is gout

[0193] In some embodiments, the joint disorder is pseudogout.

[0194] In some embodiments, the joint disorder is canine, equine, or feline lameness.

[0195] In some embodiments, the joint disorder is tendinopathy.

[0196] In some embodiments, the gene associated with the production, blocking, or removal of ROS is a nuclear factor kappa B subunit 1 (NF-κB1) gene.

[0197] In some embodiments, the at least one guide RNA comprises a crRNA sequence selected from the group consisting of those sequences shown in FIG. 5 (SEQ ID NOS: 1-328).

[0198] In some embodiments, the at least one guide RNA comprises a crRNA sequence selected from the group consisting of SEQ ID NOS: 1-149.

[0199] In some embodiments, the at least one guide RNA comprises a crRNA sequence selected from the group consisting of SEQ ID NOS: 1-45.

[0200] In some embodiments, the at least one guide RNA comprises a crRNA sequence selected from the group consisting of SEQ ID NOS: 1-13.

[0201] In some embodiments, the at least one guide RNA comprises a crRNA sequence that targets exon 1 of the NF-κB1 gene.

[0202] In some embodiments, the at least one guide RNA comprises a crRNA sequence that targets exon 2 of the NF-κB1 gene.

[0203] In some embodiments, the at least one guide RNA comprises a crRNA sequence that targets exon 3 of the NF-κB1 gene.

[0204] In some embodiments, the at least one guide RNA comprises a crRNA sequence that targets exon 4 of the NF-κB1 gene.

[0205] In some embodiments, the at least one guide RNA comprises a crRNA sequence that targets exon 5 of the NF-κB1 gene.

[0206] In some embodiments, the at least one guide RNA comprises a crRNA sequence that targets exon 6 of the NF-κB1 gene.

[0207] In some embodiments, the at least one guide RNA comprises a crRNA sequence that targets exon 7 of the NF-κB1 gene.

[0208] In some embodiments, the at least one guide RNA comprises a crRNA sequence that targets exon 8 of the NF-κB1 gene.

[0209] In some embodiments, the at least one guide RNA comprises a crRNA sequence that targets exon 9 of the NF-κB1 gene.

[0210] In some embodiments, the at least one guide RNA comprises a crRNA sequence that targets exon 10 of the NF-κB1 gene.

[0211] In some embodiments, the at least one guide RNA comprises a crRNA sequence that targets exon 11 of the NF-κB1 gene.

[0212] In some embodiments, the at least one guide RNA comprises a crRNA sequence that targets exon 12 of the NF-κB1 gene.

[0213] In some embodiments, the at least one guide RNA comprises a crRNA sequence that targets exon 13 of the NF-κB1 gene.

[0214] In some embodiments, the at least one guide RNA comprises a crRNA sequence that targets exon 14 of the NF-κB1 gene.

[0215] In some embodiments, the at least one guide RNA comprises a crRNA sequence that targets exon 15 of the NF-κB1 gene.

[0216] In some embodiments, the at least one guide RNA comprises a crRNA sequence that targets exon 16 of the NF-κB1 gene.

[0217] In some embodiments, the at least one guide RNA comprises a crRNA sequence that targets exon 17 of the NF-κB1 gene.

[0218] In some embodiments, the at least one guide RNA comprises a crRNA sequence that targets exon 18 of the NF-κB1 gene.

[0219] In some embodiments, the at least one guide RNA comprises a crRNA sequence that targets exon 19 of the NF-κB1 gene.

[0220] In some embodiments, the at least one guide RNA comprises a crRNA sequence that targets exon 20 of the NF-κB1 gene.

[0221] In some embodiments, the at least one guide RNA comprises a crRNA sequence that targets exon 21 of the NF-κB1 gene.

[0222] In some embodiments, the at least one guide RNA comprises a crRNA sequence that targets exon 22 of the NF-κB1 gene.

[0223] In some embodiments, the at least one guide RNA comprises a crRNA sequence that targets exon 23 of the NF-κB1 gene.

[0224] In some embodiments, the at least one guide RNA comprises a crRNA sequence that targets exon 24 of the NF-κB1 gene.

[0225] In some embodiments, the gene associated with the production, blocking, or removal of ROS is a nuclear factor kappa B subunit 2 (NF-κB2) gene.

[0226] In some embodiments, the at least one guide RNA comprises a crRNA sequence selected from the group consisting of those sequences shown in FIG. 6 (SEQ ID NOS: 329-680 and 5323-5410).

[0227] In some embodiments, the at least one guide RNA comprises a crRNA sequence selected from the group consisting of SEQ ID NOS: 329-497.

[0228] In some embodiments, the at least one guide RNA comprises a crRNA sequence selected from the group consisting of SEQ ID NOS: 329-384.

[0229] In some embodiments, the at least one guide RNA comprises a crRNA sequence selected from the group consisting of SEQ ID NOS: 329-335.

[0230] In some embodiments, the at least one guide RNA comprises a crRNA sequence that targets exon 1 of the NF-κB2 gene.

[0231] In some embodiments, the at least one guide RNA comprises a crRNA sequence that targets exon 2 of the NF-κB2 gene.

[0232] In some embodiments, the at least one guide RNA comprises a crRNA sequence that targets exon 3 of the NF-κB2 gene.

[0233] In some embodiments, the at least one guide RNA comprises a crRNA sequence that targets exon 4 of the NF-κB2 gene.

[0234] In some embodiments, the at least one guide RNA comprises a crRNA sequence that targets exon 5 of the NF-κB2 gene.

[0235] In some embodiments, the at least one guide RNA comprises a crRNA sequence that targets exon 6 of the NF-κB2 gene.

[0236] In some embodiments, the at least one guide RNA comprises a crRNA sequence that targets exon 7 of the NF-κB2 gene.

[0237] In some embodiments, the at least one guide RNA comprises a crRNA sequence that targets exon 8 of the NF-κB2 gene.

[0238] In some embodiments, the at least one guide RNA comprises a crRNA sequence that targets exon 9 of the NF-κB2 gene.

[0239] In some embodiments, the at least one guide RNA comprises a crRNA sequence that targets exon 10 of the NF-κB2 gene.

[0240] In some embodiments, the at least one guide RNA comprises a crRNA sequence that targets exon 11 of the NF-κB2 gene.

[0241] In some embodiments, the at least one guide RNA comprises a crRNA sequence that targets exon 12 of the NF-κB2 gene.

[0242] In some embodiments, the at least one guide RNA comprises a crRNA sequence that targets exon 13 of the NF-κB2 gene.

[0243] In some embodiments, the at least one guide RNA comprises a crRNA sequence that targets exon 14 of the NF-κB2 gene.

[0244] In some embodiments, the at least one guide RNA comprises a crRNA sequence that targets exon 15 of the NF-κB2 gene.

[0245] In some embodiments, the at least one guide RNA comprises a crRNA sequence that targets exon 16 of the NF-κB2 gene.

[0246] In some embodiments, the at least one guide RNA comprises a crRNA sequence that targets exon 17 of the NF-κB2 gene.

[0247] In some embodiments, the at least one guide RNA comprises a crRNA sequence that targets exon 18 of the NF-κB2 gene.

[0248] In some embodiments, the at least one guide RNA comprises a crRNA sequence that targets exon 19 of the NF-κB2 gene.

[0249] In some embodiments, the at least one guide RNA comprises a crRNA sequence that targets exon 20 of the NF-κB2 gene.

[0250] In some embodiments, the at least one guide RNA comprises a crRNA sequence that targets exon 21 of the NF-κB2 gene.

[0251] In some embodiments, the at least one guide RNA comprises a crRNA sequence that targets exon 22 of the NF-κB2 gene.

[0252] In some embodiments, the at least one guide RNA comprises a crRNA sequence that targets exon 23 of the NF-κB2 gene.

[0253] In some embodiments, the gene associated with the production, blocking, or removal of ROS is selected from the group consisting of a 6-phosphogluconate dehydrogenase (6PGD) gene, an alcohol dehydrogenase (ADH) gene, an aldehyde dehydrogenase (ALDH2) gene, an AP-1 gene, a B-cell lymphoma-extra large (Bcl-XL) gene, a BCL2 apoptosis regulator (Bcl-2) gene, a Bcl-2-associated X protein (BAX) gene, a catalase (CAT) gene, a c-Jun N-terminal kinase (JNK) gene, a coenzyme Q10 gene, a CYP2E1 gene, a cytochrome c (Cyt c) gene, a F1Fo-ATP synthase gene, a ferritin heavy chain (FHC) gene, a glucose-6-phosphate dehydrogenase (G6PD) gene, a glutamylcysteine synthetase (GCS) gene, a glutathione (GSH) synthase gene, a glutathione peroxidase 1 (GPX1) gene, a glutathione peroxidase 2 (GPX2) gene, a glutathione peroxidase 3 (GPX3) gene, a glutathione peroxidase 4 (GPX4) gene, a glutathione peroxidase 5 (GPX5) gene, a glutathione peroxidase 6 (GPX6) gene, a glutathione peroxidase 7 (GPX7) gene, a glutathione peroxidase 8 (GPX8) gene, a glutathione reductase (GR) gene, a glycerol 3-phosphate dehydrogenase gene, a growth arrest and DNA damage (GADD 45) gene, a hypoxia-inducible factor 1-alpha (HIF-1α) gene, a mitogen-activated protein kinase (MAPK) gene, an NADH-ubiquinone oxidoreductase gene, an NADPH oxidase 4 (NOX4) gene, an NADPH oxidase 5 (NOX5) gene, a nuclear factor kappa-light-chain-enhancer of activated B cells (NF-κB) gene, a nuclear factor κB (NF-κB) essential modulator (NEMO) gene, a p46Shc (SHC isoform) gene, a p52Shc (SHC isoform) gene, a p53 upregulated modulator of apoptosis (PUMA) gene, a p66Shc (SHC isoform) gene, a phosphoinositide 3-kinase (PI3-K) gene, a proline oxidase (PIG6, POX) gene, a quinone oxidoreductase (PIG3, NQO1) gene, a respiratory complexes I gene, a respiratory complexes II gene, a respiratory complexes III gene, a respiratory complexes IV gene, a sestrin 1 (SESN1) gene, a sestrin 2 (SESN2) gene, an SHC adaptor protein 1 (SHC1) gene, a superoxide dismutase 1 (SOD1) gene, a superoxide dismutase 2 (SOD2) gene, a superoxide dismutase 3 (SOD3) gene, a TNF alpha induced protein 3 (TNFAIP3) gene, a tumor protein 53 (p53) gene, a tumor protein p53 inducible nuclear protein 1 (TP53INP1) gene, a ubiquinol-cytochrome c oxidoreductase gene, a 2B4 gene, an ABCA1 gene, an ACP5 gene, an ADAR-1 gene, an ADSS gene, an AIG1 gene, an AIM2 gene, an APOBEC3 gene, an ARRB2 gene, a B2M gene, a BCAS3 gene, a BMP4 gene, a C10orf32 gene, a C21orf33 gene, a CASP1 gene, a CCL5 gene, a CD160 gene, a Cd53 gene, a CDKN2A gene, a CHEK1 gene, a CNNM2 gene, a CNTNAP2 gene, a CSMD1 gene, a CTLA-4 gene, a CTSB gene, a C-type lectin receptors CLRs gene, a CXCL10 gene, a CYP17A1 gene, a DDX60 gene, a DYNC1I1 gene, a FOXO3a gene, a GPC6 gene, a GRN gene, an HCK gene, an HECW1 gene, an HLA gene, an IFI30 gene, an IFI44L gene, an IFI6 gene, an IFITM gene, an IFITM1/3 gene, an IFITM2 gene, an IFITM3 gene, an IL-18 gene, an IL-1α gene, an IL-1β gene, an interferon-γ gene, an interleukin-12 (IL-12) gene, an IRF gene, an IRF-1 gene, an gene, an IRF3 gene, an IRF7 gene, a LAG-3 gene, a LIPC gene, a MDA5/IFIH1 gene, a MPAK gene, a MYH9 gene, a MYO16 gene, a MYO5A gene, an NAIP gene, an NF-κB gene, an NLRC4 gene, an gene, an NLRP3 gene, a NOD2 gene, an gene, an NPL gene, an NR gene, a nucleotide oligomerization and binding domain NOD-like receptors gene, an OAS1 gene, an OAS2 gene, an OASL gene, a parkin gene (PARK2) gene, a PD-1 gene, a PLEKHG1 gene, av PRKCA gene, a PTBP1 gene, a PYCARD gene, a Pyrin-HIN (PYHIN) domain containing receptor gene (e.g. AIM2), a reactive oxygen species (ROS) gene, a retinoic acid inducible gene-I (RIG-I)-like receptor (RLRs) gene, an RFC3 gene, a RGS1 gene, a RIG-I/DDX58 gene, a SAMHD1 gene, a SF3A1/SF3B1 gene, a SFXN2 gene, a SLAMF7 gene, a SLC41A1 gene, a SLC8A1 gene, a SLCO3A1 gene, a STAT1 gene, a tetherin gene, a TLR5 gene, a TLR7 gene, a TLR9 gene, a Toll-like receptor (TLR) gene, a TREM2 gene, a TREX1 gene, a TRIM5 gene, a TTLL7 gene, and a TYROBP gene.

[0254] In some embodiments, the RNA-guided nuclease or a nucleic acid encoding an RNA-guided nuclease is the RNA-guided nuclease.

[0255] In some embodiments, the RNA-guided nuclease or a nucleic acid encoding an RNA-guided nuclease is DNA encoding the RNA-guided nuclease.

[0256] In some embodiments, the RNA-guided nuclease or a nucleic acid encoding an RNA-guided nuclease is mRNA encoding the RNA-guided nuclease.

[0257] In some embodiments, the RNA-guided nuclease is a Cas protein.

[0258] In some embodiments, the Cas protein is a Cas9 protein.

[0259] In some embodiments, the Cas9 protein is an S. pyogenes Cas9 polypeptide.

[0260] In some embodiments, the Cas9 protein is selected from the group consisting of esCas9, hfCas9, peCas9, and ARCas9.

[0261] In some embodiments, the at least one guide RNA or a nucleic acid encoding at least one guide RNA is the at least one guide RNA.

[0262] In some embodiments, the at least one guide RNA or a nucleic acid encoding at least one guide RNA is DNA encoding the at least one guide RNA.

[0263] In some embodiments, comprising a nucleic acid encoding both the RNA-guided nuclease and the at least one guide RNA.

[0264] In some embodiments, the at least one guide RNA is a single guide RNA (sgRNA).

[0265] In some embodiments, the at least one guide RNA targets a human gene.

[0266] In some embodiments, the at least one guide RNA targets a canine gene.

[0267] In some embodiments, the at least one guide RNA targets an equine gene.

[0268] In some embodiments, the at least one guide RNA targets a feline gene.

[0269] In some embodiments, the at least one guide RNA targets a mammalian gene.

[0270] In some embodiments, the composition comprises one or more viral vectors collectively comprising the (i) RNA-guided nuclease or a nucleic acid encoding an RNA-guided nuclease, and (ii) at least one guide RNA or a nucleic acid encoding at least one guide RNA targeting a gene encoding the transmembrane receptor.

[0271] In some embodiments, the one of more viral vectors comprise a recombinant virus selected from a retrovirus, an adenovirus, an adeno-associated virus, a lentivirus, and a herpes simplex virus-1.

[0272] In some embodiments, the one of more viral vectors comprise a recombinant adeno-associated virus (AAV).

[0273] In some embodiments, the recombinant AAV is of serotype 5 (AAV5).

[0274] In some embodiments, the recombinant AAV is of serotype 6 (AAV6).

[0275] In some embodiments, the composition comprises one or more lipid nanoparticles (LNP) collectively comprising the (i) RNA-guided nuclease or a nucleic acid encoding an RNA-guided nuclease, and (ii) at least one guide RNA or a nucleic acid encoding at least one guide RNA targeting a gene encoding the transmembrane receptor.

[0276] In some embodiments, the one or more LNP comprises a first plurality of LNP encapsulating the RNA-guided nuclease or a nucleic acid encoding an RNA-guided nuclease; and a second plurality of LNP encapsulating the at least one guide RNA or a nucleic acid encoding at least one guide RNA.

[0277] In some embodiments, the one or more LNP comprises a plurality of LNP encapsulating both the (i) RNA-guided nuclease or a nucleic acid encoding an RNA-guided nuclease, and (ii) at least one guide RNA or a nucleic acid encoding at least one guide RNA targeting a gene encoding the transmembrane receptor.

[0278] In some embodiments, the one or more LNP comprises a component selected from the group consisting of 3-(didodecylamino)-N1,N1,4-tridodecyl-1-piperazineethanamine (KL10), N1-[2-(didodecylamino)ethyl]-N1,N4,N4-tridodecyl-1,4-piperazinediethanamine (KL22), 14,25-ditridecyl-15,18,21,24-tetraaza-octatriacontane (KL25), 1,2-dilinoleyloxy-N,N-dimethylaminopropane (DLin-DMA), 2,2-dilinoleyl-4-dimethylaminomethyl-[1,3]-dioxolane (DLin-K-DMA), heptatriaconta-6,9,28,31-tetraen-19-yl 4-(dimethylamino)butanoate (DLin-MC3-DMA), 2,2-dilinoleyl-4-(2-dimethylaminoethyl)-[1,3]-dioxolane (DLin-KC2-DMA), 1,2-dioleyloxy-N,N-dimethylaminopropane (DODMA), 2-({8-[(3.beta.)-cholest-5-en-3-yloxy]octyl}oxy)-N,N-dimethyl-3-[(9Z,12Z)—octadeca-9,12-dien-1-yloxy]propan-1-amine (Octyl-CLinDMA), (2R)-2-({8-[(3.beta.)-cholest-5-en-3-yloxy]octyl}oxy)-N,N-dimethyl-3-[(9Z-,12Z)-octadeca-9,12-dien-1-yloxy]propan-1-amine (Octyl-CLinDMA (2R)), (2S)-2-({8-[(3.beta.)-cholest-5-en-3-yloxy]octyl}oxy)-N,N-dimethyl-3-[(9Z-,12Z)-octadeca-9,12-dien-1-yloxy]propan-1-amine (Octyl-CLinDMA (2S)), a lipid including a cyclic amine group, and a mixture thereof.

[0279] In some embodiments, the LNP comprises a component selected from the group consisting of 1,2-dilinoleoyl-sn-glycero-3-phosphocholine (DLPC), 1,2-dimyristoyl-sn-glycero-phosphocholine (DMPC), 1,2-dioleoyl-sn-glycero-3-phosphocholine (DOPC), 1,2-dipalmitoyl-sn-glycero-3-phosphocholine (DPPC), 1,2-distearoyl-sn-glycero-3-phosphocholine (DSPC), 1,2-diundecanoyl-sn-glycero-phosphocholine (DUPC), 1-palmitoyl-2-oleoyl-sn-glycero-3-phosphocholine (POPC), 1,2-di-O-octadecenyl-sn-glycero-3-phosphocholine (18:0 Diether PC), 1-oleoyl-2-cholesterylhemisuccinoyl-sn-glycero-3-phosphocholine (OChemsPC), 1-hexadecyl-sn-glycero-3-phosphocholine (C16 Lyso PC), 1,2-dilinolenoyl-sn-glycero-3-phosphocholine, 1,2-diarachidonoyl-sn-glycero-3-phosphocholine, 1,2-didocosahexaenoyl-sn-glycero-3-phosphocholine, 1,2-dioleoyl-sn-glycero-3-phosphoethanolamine (DOPE), 1,2-diphytanoyl-sn-glycero-3-phosphoethanolamine (ME 16.0 PE), 1,2-distearoyl-sn-glycero-3-phosphoethanolamine, 1,2-dilinoleoyl-sn-glycero-3-phosphoethanolamine, 1,2-dilinolenoyl-sn-glycero-3-phosphoethanolamine, 1,2-diarachidonoyl-sn-glycero-3-phosphoethanolamine, 1,2-didocosahexaenoyl-sn-glycero-3-phosphoethanolamine, 1,2-dioleoyl-sn-glycero-3-phospho-rac-(1-glycerol) sodium salt (DOPG), sphingomyelin (SM), and a mixture thereof.

[0280] In some embodiments, the LNP comprises a component selected from the group consisting of PEG-modified phosphatidylethanolamines, PEG-modified phosphatidic acids, PEG-modified ceramides, PEG-modified dialkylamines, PEG-modified diacylglycerols, PEG-modified dialkylglycerols, and mixtures thereof. For example, a PEG lipid may be PEG-c-DOMG, PEG-DMG, PEG-DLPE, PEG-DMPE, PEG-DPPC, PEG-DMA, a PEG-DSPE lipid, and a mixture thereof.

[0281] In some embodiments, the LNP comprises a component selected from the group consisting of a cholesterol, fecosterol, stigmasterol, stigmastanol, sitosterol, β-sitosterol, lupeol, betulin, ursolic acid, oleanolic acid, campesterol, fucosterol, brassicasterol, ergosterol, 9,11-dehydroergosterol, tomatidine, tomatine, α-tocopherol, and a mixture thereof.

[0282] In some embodiments, the composition comprises one or more liposomes collectively comprising the (i) RNA-guided nuclease or a nucleic acid encoding an RNA-guided nuclease, and (ii) at least one guide RNA or a nucleic acid encoding at least one guide RNA targeting a gene encoding the transmembrane receptor.

[0283] In some embodiments, the one or more liposomes comprises a first plurality of liposomes encapsulating the RNA-guided nuclease or a nucleic acid encoding an RNA-guided nuclease; and a second plurality of liposomes encapsulating the at least one guide RNA or a nucleic acid encoding at least one guide RNA.

[0284] In some embodiments, the one or more liposomes comprises a plurality of liposomes encapsulating both the (i) RNA-guided nuclease or a nucleic acid encoding an RNA-guided nuclease, and (ii) at least one guide RNA or a nucleic acid encoding at least one guide RNA targeting a gene encoding the transmembrane receptor.

[0285] In some embodiments, the composition comprises one or more virus-like particles collectively comprising the (i) RNA-guided nuclease or a nucleic acid encoding an RNA-guided nuclease, and (ii) at least one guide RNA or a nucleic acid encoding at least one guide RNA targeting a gene encoding the transmembrane receptor.

[0286] In some embodiments, the one or more virus-like particles comprises:

[0287] In some embodiments, a first plurality of virus-like particles encapsulating the RNA-guided nuclease or a nucleic acid encoding an RNA-guided nuclease; and a second plurality of virus-like particles encapsulating the at least one guide RNA or a nucleic acid encoding at least one guide RNA.

[0288] In some embodiments, the one or more virus-like particles comprises a plurality of virus-like particles encapsulating both the (i) RNA-guided nuclease or a nucleic acid encoding an RNA-guided nuclease, and (ii) at least one guide RNA or a nucleic acid encoding at least one guide RNA targeting a gene encoding the transmembrane receptor.

[0289] In some embodiments, the composition is formulated for parenteral administration.

[0290] In some embodiments, the composition is formulated for intra-articular injection within a joint of the subject.

[0291] In some embodiments, the disclosure provides a method for treating or preventing a joint disorder in a subject in need thereof, comprising administering a therapeutically effective amount of a pharmaceutical composition described above to the subject.

[0292] In some embodiments, the disclosure provides a method for treating or preventing a joint disorder in a subject in need thereof, comprising administering a therapeutically effective amount of a pharmaceutical composition described above to the subject.

### VII. Administration Routes

[0293] The methods and compositions herein described encompass the use of pharmaceutical compositions comprising a CRISPR gene-editing system as an active ingredient.

[0294] Depending on the method/route of administration, pharmaceutical dosage forms come in several types. These include many kinds of liquid, solid, and semisolid dosage forms. Common pharmaceutical dosage forms include pill, tablet, or capsule, drink or syrup, and natural or herbal form such as plant or food of sorts, among many others. Notably, the route of administration (ROA) for drug delivery is dependent on the dosage form of the substance in question. A liquid pharmaceutical dosage form is the liquid form of a dose of a chemical compound used as a drug or medication intended for administration or consumption.

[0295] As used herein, “dermal delivery” or “dermal administration” can refer to a route of administration wherein the pharmaceutical dosage form is taken to, or through, the dermis (i.e., layer of skin between the epidermis (with which it makes up the cutis) and subcutaneous tissues). “Subcutaneous delivery” can refer to a route of administration wherein the pharmaceutical dosage form is to or beneath the subcutaneous tissue layer.

[0296] Methods of formulating suitable pharmaceutical compositions are known in the art, see, e.g., Remington: The Science and Practice of Pharmacy, 21st ed., 2005; and the books in the series Drugs and the Pharmaceutical Sciences: a Series of Textbooks and Monographs (Dekker, N.Y.). For example, solutions or suspensions used for parenteral, intradermal, or subcutaneous application can include the following components: a sterile diluent such as water for injection, saline solution, fixed oils, polyethylene glycols, glycerin, propylene glycol or other synthetic solvents; antibacterial agents such as benzyl alcohol or methyl parabens; antioxidants such as ascorbic acid or sodium bisulfate; chelating agents such as ethylenediaminetetraacetic acid; buffers such as acetates, citrates or phosphates and agents for the adjustment of tonicity such as sodium chloride or dextrose. pH can be adjusted with acids or bases, such as hydrochloric acid or sodium hydroxide. The parenteral preparation can be enclosed in ampoules, disposable syringes or multiple dose vials made of glass or plastic.

[0297] Pharmaceutical compositions suitable for injectable use can include sterile aqueous solutions (where water soluble) or dispersions and sterile powders for the extemporaneous preparation of sterile injectable solutions or dispersion. For intravenous administration, suitable carriers include physiological saline, bacteriostatic water, Cremophor EL™ (BASF, Parsippany, N.J.) or phosphate buffered saline (PBS). In all cases, the composition must be sterile and should be fluid to the extent that easy syringability exists. It should be stable under the conditions of manufacture and storage and must be preserved against the contaminating action of microorganisms such as bacteria and fungi. The carrier can be a solvent or dispersion medium containing, for example, water, ethanol, polyol (for example, glycerol, propylene glycol, and liquid polyethylene glycol, and the like), and suitable mixtures thereof. The proper fluidity can be maintained, for example, by the use of a coating such as lecithin, by the maintenance of the required particle size in the case of dispersion and by the use of surfactants. Prevention of the action of microorganisms can be achieved by various antibacterial and antifungal agents, for example, parabens, chlorobutanol, phenol, ascorbic acid, thimerosal, and the like. In many cases, it will be preferable to include isotonic agents, for example, sugars, polyalcohols such as mannitol, sorbitol, sodium chloride in the composition. Prolonged absorption of the injectable compositions can be brought about by including in the composition an agent that delays absorption, for example, aluminum monostearate and gelatin.

[0298] Sterile injectable solutions can be prepared by incorporating the active compound in the required amount in an appropriate solvent with one or a combination of ingredients enumerated above, as required, followed by filtered sterilization. Generally, dispersions are prepared by incorporating the active compound into a sterile vehicle, which contains a basic dispersion medium and the required other ingredients from those enumerated above. In the case of sterile powders for the preparation of sterile injectable solutions, the preferred methods of preparation are vacuum drying and freeze-drying, which yield a powder of the active ingredient plus any additional desired ingredient from a previously sterile-filtered solution thereof.

[0299] Therapeutic compounds that are or include nucleic acids can be administered by any method suitable for administration of nucleic acid agents, such as a DNA vaccine. These methods include gene guns, bio injectors, and skin patches as well as needle-free methods such as the micro-particle DNA vaccine technology disclosed in U.S. Pat. No. 6,194,389, and the mammalian transdermal needle-free vaccination with powder-form vaccine as disclosed in U.S. Pat. No. 6,168,587. Additionally, intranasal delivery is possible, as described in, inter alia, Hamajima et al., Clin. Immunol. Immunopathol., 88(2), 205-10 (1998). Liposomes (e.g., as described in U.S. Pat. No. 6,472,375) and microencapsulation can also be used. Biodegradable targetable microparticle delivery systems can also be used (e.g., as described in U.S. Pat. No. 6,471,996).

[0300] Therapeutic compounds can be prepared with carriers that will protect the therapeutic compounds against rapid elimination from the body, such as a controlled release formulation, including implants and microencapsulated delivery systems. Biodegradable, biocompatible polymers can be used, such as collagen, ethylene vinyl acetate, polyanhydrides (e.g., poly[1,3-bis(carboxyphenoxy)propane-co-sebacic-acid](PCPP-SA) matrix, fatty acid dimer-sebacic acid (FAD-SA) copolymer, poly(lactide-co-glycolide)), polyglycolic acid, collagen, polyorthoesters, polyethylene glycol-coated liposomes, hyaluronic acid and polylactic acid. Such formulations can be prepared using standard techniques, or obtained commercially, e.g., from Alza Corporation and Nova Pharmaceuticals, Inc. Liposomal suspensions (including liposomes targeted to selected cells with monoclonal antibodies to cellular antigens) can also be used as pharmaceutically acceptable carriers. These can be prepared according to methods known to those skilled in the art, for example, as described in U.S. Pat. No. 4,522,811. Semisolid, gelling, soft-gel, or other formulations (including controlled release) can be used, e.g., when administration to a surgical site is desired. Methods of making such formulations are known in the art and can include the use of biodegradable, biocompatible polymers. See, e.g., Sawyer et al., Yale J Biol Med. 2006 December; 79(3-4): 141-152.

[0301] The pharmaceutical compositions described herein may be included in a container, kit, pack, or dispenser together with instructions for administration.

### A. Systemic Administration

[0302] In some embodiments, a pharmaceutical composition comprising a CRISPR gene-editing system is administered systemically to a mammal in need thereof. In some embodiments, the composition is formulated for intravenous injection. In some embodiments, the composition is formulated for oral administration. In some embodiments, the composition is formulated for parenteral administration.

### B. Local Administration

[0303] In some embodiments, a pharmaceutical composition comprising a CRISPR gene-editing system is administered locally to a mammal in need thereof. In some embodiments, the local administration is an intra-articular injection.

[0304] In some embodiments, a pharmaceutical composition comprising a CRISPR gene-editing system is administered locally to a mammal in need thereof during a surgical procedure. In some embodiments, a pharmaceutical composition comprising a CRISPR gene-editing system is administered locally to a mammal in need thereof 1, 2, 3, 4, 5, 6, 7, 8, 9, 10, 20, or 30 days after a surgical procedure.

### EXAMPLES

[0305] The embodiments encompassed herein are now described with reference to the following examples. These examples are provided for the purpose of illustration only and the disclosure encompassed herein should in no way be construed as being limited to these examples, but rather should be construed to encompass any and all variations which become evident as a result of the teachings provided herein.

### Example 1: MSU Treatment of Canine Monocytes Triggers Upregulation of Multiple Inflammatory Effectors

[0306] To understand the potential nexus between inflammatory signaling (and, by extension, induction of ROS) and joint disease, the transcriptional response to monosodium urate (MSU) crystals—a proxy for the build-up of uric acid observed in gout—were investigated in canine DH82 monocytes (biological triplicates, N=3), using bulk RNA-Seq and differential expression analysis DESeq2. Cells were exposed to either saline solution PBS (negative control) or 400 μg/ml MSU crystals, and total RNA was extracted after 24 hours.

[0307] The results found that, compared to PBS controls, MSU-treated cells exhibited strong transcriptional induction of NFKB1 and NFKB2, both of which are downstream effectors of ROS detection and upstream regulators of pro-inflammatory signaling (FIG. 1). These results demonstrated the importance of the expression of NFKB1 and NFKB2 at the transcriptional level in an in vitro disease model and suggested that targeted interventions that could abrogate the inflammatory response to ROS detection, thereby treating any number of conditions that are caused or exacerbated by ROS.

### Example 2: Design and Selection of Guides for Editing of NFKB1

[0308] A pipeline of in silico and in vitro screening was developed to identify candidate CRISPR-Cas guides for gene editing. The pipeline was applied to identify guides that effectively edit the human NFKB1 gene (hNFKB1), thereby disrupting the pathway the results in ROS production before it can be activated. The first step in the pipeline was to identify all possible crRNA sequences for a particular CRISPR-Cas protein in the coding portions of the hNFKB1. Many algorithms for identifying such sequences are known in the art. Generally, these algorithms function by identifying a protospacer adjacent motif (PAM) sequence for the particular CRISPR-Cas protein and then locate the sequence spaced according to the requirements of the particular Cas protein, typically directly 5′ of the PAM site. For example, the S. pyogenes Cas9 (SpCas9) protein, which was used in this Example, recognizes a 5′-NGG-3′ PAM sequence. Thus, all sequences directly 5′ of an NGG trinucleotide are possible crRNA sequences. crRNA sequences identified in this fashion as shown in FIG. 5, along with biographical information about the crRNA sequence.

[0309] Next, each identified crRNA sequence was evaluated across three different metrics: possible off-target editing at locations in the genome other than the target gene, on-target editing efficiency, and the likelihood of editing causing frameshift mutations, using multiple algorithms for each metric. The basis of the combinatorial approach used lies in the assumption that every model has blind spots that may skew the fitness of a particular guide RNA. Weighting these scores to obtain a consensus score for each of these properties allows for much better prediction of sgRNA fitness.

[0310] Off-target editing effects were predicted by averaging scores generated by the MIT, CFD and Elevation (human only) model. The MIT algorithm, also known as Hsu-Zhang score. Hsu, P. D. et al. DNA targeting specificity of RNA-guided Cas9 nucleases. Nature Biotechnology 31, 827-832 (2013). This model is based on a positional penalty matrix (1×20) generated from 15 EMX1 sgRNA libraries with mismatches against target at every position. The CFD algorithm (Cutting Frequency Determination) is based on threat matrix (12×20) considering both position and mismatch type and PAM integrity (27,897 ‘CD33’ sgRNAs+10,618 negative control sgRNAs). Doench, J. G. et al. Optimized sgRNA design to maximize activity and minimize off-target effects of CRISPR-Cas9. Nature Biotechnology 34, 184-191 (2016). The Elevation score using machine learning algorithms trained by genome-wide (GUIDE-Seq) and other aggregated off-target profiling data. Listgarten, J. et al. Prediction of off-target activities for the end-to-end design of CRISPR guide RNAs. Nature Biomedical Engineering 2, 38-47 (2018). The column labelled “OFF” shows the mean of the scores provided by the two or three models, respectively. The column labelled “OffTarget #” shows the number of potential off-targets with up to four mismatches as calculated by CRISPOR. See, Haeussler, M. et al. Evaluation of off-target and on-target scoring algorithms and integration into the guide RNA selection tool CRISPOR. Genome Biology 17, 148 (2016).

[0311] On-target editing efficiencies were predicted by averaging scores generated by the Azimuth model, the DeepSpCas9 model, and the CrisprScan model. The Azimuth model is a boosted regression tree model, trained with 881 sgRNAs (MOLM13/NB4/TF1 cells and additional unpublished data) delivered by lentivirus. Doench, J. G. et al. Optimized sgRNA design to maximize activity and minimize off-target effects of CRISPR-Cas9. Nature Biotechnology 34, 184-191 (2016). DeepSpCas9 is a deep learning model trained using editing data from 12,832 sgRNA. Kim, H. K. et al. SpCas9 activity prediction by DeepSpCas9, a deep learning-based model with high generalization performance. Science Advances 5(11)(2019). CrisprScan is a linear regression model, trained using editing data from 1000 sgRNAs injected into zebrafish embryos targeting >100 genes. Moreno-Mateos, M. A. et al. CRISPRscan: designing highly efficient sgRNAs for CRISPR-Cas9 targeting in vivo. Nature Methods 12, 982-988 (2015). The column labelled “ON” shows the mean of the scores provided by the three models.

[0312] The putative guides' potential to generate frameshift mutations were predicted by averaging scores generated by the Lindel model and the InDelphi model. Lindel is a machine learning model trained using profile data of 1.16 million independent mutational events triggered by CRISPR/Cas9-mediated cleavage and non-homologous end joining-mediated double strand break repair of 6872 synthetic target sequences, introduced into a human cell line via lentiviral infection. Chen, W. et al. Massively parallel profiling and predictive modeling of the outcomes of CRISPR/Cas9-mediated double-strand break repair. Nucleic Acids Research 47, 7989-8003 (2019). InDelphi is machine learning model trained with indels generated by 1872 sgRNAs. Shen, M. W. et al. Predictable and precise template-free CRISPR editing of pathogenic variants. Nature 563, 646-651 (2018). The column labelled “Frameshift” shows the mean of the scores provided by the two models. The column labelled “Precision” shows the frequency distribution of indels estimated by inDelphi. High precision is closer to 100 and represents sgRNAs that are characterised by one or a very low number of repair outcomes.

[0313] The candidate crRNA sequences were then evaluated for the presence of Graf motifs, TT or GCC present in the 4 PAM proximal bases of the crRNA sequence, as indicated in, e.g., FIGS. 26-42, as either TT or GCC. Graf, R. et al. sgRNA Sequence Motifs Blocking Efficient CRISPR/Cas9-Mediated Gene Editing. Cell Reports, 26(5), 1098-103 (2019). Graf et al. reported that TT- and GCC-motifs are a hallmark of inefficient sgRNAs. If possible, crRNA with Graf motifs and in particular the GCC motif were avoided. In contrast to the TT motif, the GCC motif remains critical if sgRNAs are synthesized de novo rather than by transcription.

[0314] As shown in, e.g., FIGS. 5-6, three consensus scores were then calculated for each crRNA sequence. The “ON-OFF” score represents the mean of the “ON” and “OFF” score. The “OFF-FS” score represents the mean of the “OFF” and “Frameshift” score. The OVERALL score represents the mean of the “ON”, “OFF” and “Frameshift” score. Additionally, for human only, VBC's Bioscore was used to predict whether a possible in-frame mutation could disturb protein function. This is more likely to occur in conserved genomic DNA sequences coding for critical protein domains. Thus, Bioscore is based on protein domain annotations, phylogenetic conservation, amino acid identities and exon size. Michlits, G. et al. Multilayered VBC score predicts sgRNAs that efficiently generate loss-of-function alleles. Nature Methods 17, 708-716 (2020). The final criteria for selecting candidates is mainly based on the OVERALL score (in most cases >70), the relative low counts of potential off-targets (in most cases <200 off-targets), the absence of Graf motifs (if possible) and the genomic cut position within the coding sequence to produce knockouts or truncated proteins with reduced functionality.

[0315] Indeed, this in silico analysis established that several candidate sgRNAs were predicted to yield genomic edits that would create a genetic knockout of the NFKB1, thereby impacting intracellular ROS production and pro-inflammatory signaling. These predictive studies demonstrated the feasibility of inducing an indel within the genome at the NFKB1 locus as a unique approach to tamping down ROS in cells and provided a high-throughput method for validating candidates without the need for time- and resource-intensive brute force methods.

### Example 3: Design and Selection of Guides for Editing of NFKB2

[0316] A pipeline of in silico and in vitro screening was developed to identify candidate CRISPR-Cas guides for gene editing. The pipeline was applied to identify guides that effectively edit the human NFKB2 gene (hNFKB2), thereby disrupting the pathway that results in ROS production before it can be activated. The first step in the pipeline was to identify all possible crRNA sequences for a particular CRISPR-Cas protein in the coding portions of the hNFKB2. The approach to design and in silico analysis is described in detail in Example 2.

[0317] As shown in FIG. 6, this approach established that several candidate sgRNAs were predicted to yield genomic edits that would create a genetic knockout of the NFKB2, thereby impacting intracellular ROS production and pro-inflammatory signaling. These predictive studies demonstrated the feasibility of inducing an indel within the genome at the NFKB2 locus as a unique approach to tamping down ROS in cells and provided a high-throughput method for validating candidates without the need for time- and resource-intensive brute force methods.

### Example 4: Validation of NFKB1 Editing in Human Cells

[0318] Having designed and analyzed numerous sgRNA candidates that were predicted to edit the NFKB1 gene to produce a knockout (see FIG. 5A), the next step is to assess their ability to act in vitro. Of particular interest is whether the preferred (i.e., on-target) edit will be observed in edited cells.

[0319] To test this, 80 pmoles of sgRNA candidates (SEQ ID NOs: 1-328) are introduced into human THP-1 monocytes via electroporation as part of a ribonucleoprotein (i.e., pre-assembled with 25 pmoles or either wtCas9 or AR-Cas9 protein at room temperature for at least 5 min). In brief, around 600,000 cells resuspended in 20 μl PKM buffer (2.7 mM KCl, 137 mM NaCl, 10 mM Na2HPO4/1.8 mM NaH2PO4 (pH 7.4) and 50 mM D-Mannitol) are added to the pre-assembled Cas9 ribonucleoprotein complex, transferred into 16-well nucleocuvettes and electroporated with pulse code CM-137 using the 4D nucleofector (Lonza). Electroporated cells are kept in PKM buffer for about 10 min before transferring them into 6-well tissue culture plates with complete culture media. After 2-5 days in culture, cells are dissociated for genomic DNA extraction using the DNeasy Blood & Tissue Kit (Qiagen). sgRNA target regions are amplified by PCR and editing efficacy is then deduced from Sanger sequencing traces using Inference of CRISPR Edits (ICE v1.2). Conant, D. et al. (2022). The CRISPR Journal, 5(1), 123-130 (2022).

[0320] It is anticipated that results of these studies will confirm the robustness of the in silico analysis described above and identify multiple candidates that are indeed able to induce mutation in the NFKB1 gene at high efficacy. It is further expected that use of AR-Cas9 will improve editing efficacy (i.e., increase on-target editing) as compared to wtCas9.

### Example 5: In Vitro Delivery of NFKB1-Editing Guide RNA to Human Cells Via Lipid Nanoparticles

[0321] Because all validation experiments are to be conducted via electroporation of cell cultures to introduce RNA-dependent nucleases and sgRNAs, additional experiments will assess the suitability of using lipid nanoparticle (LNP) to deliver mRNA to human cells. 0.025 mg/mL of a LNP containing either 80 pmoles of sgRNA (SEQ ID NOs: 1-328) or 80 pmoles of Cas9 mRNA (alternatively, sgRNA may be pre-assembled with 25 pmoles or either wtCas9 or AR-Cas9 protein at room temperature for at least 5 min and encapsulated as an RNP) are exposed to THP-1 monocytes for 8 to 24 hours under typical cell culture conditions. Sanger sequencing as described in Example 4 will be used to validate editing. Upon confirmation of editing, various functional assays, e.g., those described in Example 1, will be performed with the edited cells.

### Example 6: In Vitro Delivery of NFKB1-Editing Guide RNA to Human Cells Via Adeno-Associated Virus

[0322] Because all validation experiments are to be conducted via electroporation of cell cultures to introduce RNA-dependent nucleases and sgRNAs, additional experiments will assess the suitability of using adeno-associated virus (AAV) vectors to deliver sgRNA to human cells.

TABLE 3
Exemplary AAV vectors for introduction of sgRNA to human cells.

AAVPrimeTM Adeno-Associated Virus - Serotype6 (AAV-6) Particles for sgRNA
(GeneCopoeia ™, catalog No. AA06-MCP001682-AD01-2-200-a, lot No. GC03182K2001)
AAVPrimeTM Adeno-Associated Virus - Serotype6 (AAV-6) Particles for sgRNA
(GeneCopoeia ™, catalog No. AA06-MCP001682-AD01-2-200-b, lot No. GC03202K2001)
AAVPrimeTM Adeno-Associated Virus - Serotype6 (AAV-6) Particles for sgRNA
(GeneCopoeia ™, catalog No. AA06-CCPCTR01-AD01-200, lot No. GC03112K2002)
AAVPrimeTM Adeno-Associated Virus - Serotype5 (AAV-5) Particles for sgRNA
(GeneCopoeia ™, catalogue No. AA05-MCP001682-AD01-2-200A, lot No. GC-
03182K2002)
AAVPrimeTM Adeno-Associated Virus - Serotype5 (AAV-5) Particles for sgRNA
(GeneCopoeia ™, catalogue No. AA05-MCP001682-AD01-2-200B, lot No.
GC03182K2003)
AAVPrimeTM Adeno-Associated Virus - Serotype5 (AAV-5) Particles for sgRNA
(GeneCopoeiaTM, catalogue No. AA05-CCPCTR01-AD01-200, lot No. GC03032K2003)

[0323] Exemplary AAV vectors are shown in Table 3. After being prepared according to manufacturer specifications, such that one or more of the sgRNAs containing SEQ ID NOs: 1-328 are integrated into the viral vector, said vectors are incubated (MOI=0.1 to 10) with approximately 500,000 U2OS cells that have been stably transfected with Cas9 (see, e.g., Rojas-Fernandez, A., et al. (2015). Scientific Reports, 5(1), 1-6). At 2-7 days post-infection, Sanger sequencing as described in Example 4 will be used to validate editing. Upon confirmation of editing, various functional assays, e.g., those described in Example 1, will be performed with the edited cells.

### Example 7: Validation of NFKB2 Editing in Human Cells

[0324] Having designed and analyzed numerous sgRNA candidates that were predicted to edit the human NFKB2 gene to produce a genetic knockout (see FIG. 6A), the next step is to assess their ability to act in vitro. Of particular interest is whether the preferred (i.e., on-target) edit will be observed in edited cells.

[0325] To test this, 80 pmoles of sgRNA candidates (SEQ ID NOs: 329-680 and 5323-5410) are introduced into human THP-1 monocytes via electroporation as part of a ribonucleoprotein as previously described in Example 4.

[0326] It is anticipated that results of these studies will confirm the robustness of the in silico analysis and identify multiple candidates are indeed able to induce mutation in the IL1RAP gene at high efficacy. It is further expected that use of AR-Cas9 will improve editing efficacy (i.e., increase on-target editing) as compared to wtCas9.

### Example 8: In Vitro Delivery of NFKB2-Editing Guide RNA to Human Cells Via Lipid Nanoparticles

[0327] Because all validation experiments are to be conducted via electroporation of cell cultures to introduce RNA-dependent nucleases and sgRNAs, additional experiments will assess the suitability of using lipid nanoparticle (LNP) to deliver mRNA to human cells. LNPs containing either sgRNA (SEQ ID NOs: 329-680 and 5323-5410) or Cas9 mRNA are incubated with THP-1 monocytes, followed by validation of editing as described in Example 5. Upon confirmation of editing various functional assays, e.g., those described in Example 1, will be performed with the edited cells.

### Example 9: In Vitro Delivery of NFKB2-Editing Guide RNA to Human Cells Via Adeno-Associated Virus

[0328] Because all validation experiments are to be conducted via electroporation of cell cultures to introduce RNA-dependent nucleases and sgRNAs, additional experiments will assess the suitability of using adeno-associated virus (AAV) vectors to deliver sgRNA to human cells. Exemplary AAV vectors are shown in Table 3. After being prepared according to manufacturer specifications, such that one or more of the sgRNAs containing SEQ ID NOs: 329-680 or SEQ ID NOs: 5323-5410 are integrated into the viral vector, said vectors are introduced to human U2OS cells and editing is validated as previously described in Example 6. Upon confirmation of editing, various functional assays, e.g., those described in Example 1, will be performed.

[0329] The examples set forth above are provided to give those of ordinary skill in the art a complete disclosure and description of how to make and use the embodiments of the compositions, systems and methods of the disclosure, and are not intended to limit the scope of what the inventors regard as their invention. Modifications of the above-described modes for carrying out the embodiments of the disclosure that are obvious to persons of skill in the art are intended to be within the scope of the following claims. All patents and publications mentioned in the specification are indicative of the levels of skill of those skilled in the art to which the disclosure pertains.

[0330] All headings and section designations are used for clarity and reference purposes only and are not to be considered limiting in any way. For example, those of skill in the art will appreciate the usefulness of combining various aspects from different headings and sections as appropriate according to the spirit and scope of the disclosure described herein.

[0331] It is to be understood that the methods described herein are not limited to the particular methodology, protocols, subjects, and sequencing techniques described herein and as such can vary. It is also to be understood that the terminology used herein is for the purpose of describing particular embodiments only, and is not intended to limit the scope of the methods and compositions described herein, which will be limited only by the appended claims. While some embodiments of the present disclosure have been shown and described herein, it will be obvious to those skilled in the art that such embodiments are provided by way of example only. Numerous variations, changes, and substitutions will now occur to those skilled in the art without departing from the disclosure. It should be understood that various alternatives to the embodiments of the disclosure described herein can be employed in practicing the disclosure. It is intended that the following claims define the scope of the disclosure and that methods and structures within the scope of these claims and their equivalents be covered thereby.

[0332] The examples set forth above are provided to give those of ordinary skill in the art a complete disclosure and description of how to make and use the embodiments of the compositions, systems and methods of the disclosure, and are not intended to limit the scope of what the inventors regard as their invention. Modifications of the above-described modes for carrying out the embodiments of the disclosure that are obvious to persons of skill in the art are intended to be within the scope of the following claims. All patents and publications mentioned in the specification are indicative of the levels of skill of those skilled in the art to which the disclosure pertains.

[0333] All headings and section designations are used for clarity and reference purposes only and are not to be considered limiting in any way. For example, those of skill in the art will appreciate the usefulness of combining various aspects from different headings and sections as appropriate according to the spirit and scope of the disclosure described herein.

[0334] It is to be understood that the methods described herein are not limited to the particular methodology, protocols, subjects, and sequencing techniques described herein and as such can vary. It is also to be understood that the terminology used herein is for the purpose of describing particular embodiments only, and is not intended to limit the scope of the methods and compositions described herein, which will be limited only by the appended claims. While some embodiments of the present disclosure have been shown and described herein, it will be obvious to those skilled in the art that such embodiments are provided by way of example only. Numerous variations, changes, and substitutions will now occur to those skilled in the art without departing from the disclosure. It should be understood that various alternatives to the embodiments of the disclosure described herein can be employed in practicing the disclosure. It is intended that the following claims define the scope of the disclosure and that methods and structures within the scope of these claims and their equivalents be covered thereby.

[0335] Several aspects are described with reference to example applications for illustration. Unless otherwise indicated, any embodiment can be combined with any other embodiment. It should be understood that numerous specific details, relationships, and methods are set forth to provide a full understanding of the features described herein. A skilled artisan, however, will readily recognize that the features described herein can be practiced without one or more of the specific details or with other methods. The features described herein are not limited by the illustrated ordering of acts or events, as some acts can occur in different orders and/or concurrently with other acts or events. Furthermore, not all illustrated acts or events are required to implement a methodology in accordance with the features described herein.

[0336] While some embodiments have been shown and described herein, it will be obvious to those skilled in the art that such embodiments are provided by way of example only. It is not intended that the disclosure be limited by the specific examples provided within the specification. While the disclosure has been described with reference to the aforementioned specification, the descriptions and illustrations of the embodiments herein are not meant to be construed in a limiting sense. Numerous variations, changes, and substitutions will now occur to those skilled in the art without departing from the disclosure.

[0337] Furthermore, it shall be understood that all aspects of the disclosure are not limited to the specific depictions, configurations or relative proportions set forth herein which depend upon a variety of conditions and variables. It should be understood that various alternatives to the embodiments of the disclosure described herein can be employed in practicing the disclosure. It is therefore contemplated that the disclosure shall also cover any such alternatives, modifications, variations or equivalents. It is intended that the following claims define the scope of the disclosure and that methods and structures within the scope of these claims and their equivalents be covered thereby.

[0338] All publications, patents, and patent applications herein are incorporated by reference to the same extent as if each individual publication, patent, or patent application was specifically and individually indicated to be incorporated by reference. In the event of a conflict between a term herein and a term in an incorporated reference, the term herein controls.

What is claimed is:

1. A pharmaceutical composition for treating or preventing a joint disorder, comprising:
(i) an RNA-guided nuclease or a nucleic acid encoding an RNA-guided nuclease; and
(ii) at least one guide RNA or a nucleic acid encoding at least one guide RNA targeting a gene associated with the production, blocking, or removal of reactive oxygen species (ROS).

2. The pharmaceutical composition of claim 1, wherein the joint disorder is arthritis.

3. The pharmaceutical composition of claim 1, wherein the joint disorder is osteoarthritis.

4. The pharmaceutical composition of claim 1, wherein the joint disorder is rheumatoid arthritis.

5. The pharmaceutical composition of claim 1, wherein the joint disorder is post-traumatic arthritis.

6. The pharmaceutical composition of claim 1, wherein the joint disorder is gout

7. The pharmaceutical composition of claim 1, wherein the joint disorder is pseudogout.

8. The pharmaceutical composition of claim 1, wherein the joint disorder is canine, equine, or feline lameness.

9. The pharmaceutical composition of claim 1, wherein the joint disorder is tendinopathy.

10. The pharmaceutical composition of any one of claims 1-9, wherein the gene associated with the production, blocking, or removal of ROS is a nuclear factor kappa B subunit 1 (NF-κB1) gene.

11. The pharmaceutical composition of claim 10, wherein the at least one guide RNA comprises a crRNA sequence selected from the group consisting of those sequences shown in FIG. 5 (SEQ ID NOS: 1-328).

12. The pharmaceutical composition of claim 10, wherein the at least one guide RNA comprises a crRNA sequence selected from the group consisting of SEQ ID NOS: 1-149.

13. The pharmaceutical composition of claim 10, wherein the at least one guide RNA comprises a crRNA sequence selected from the group consisting of SEQ ID NOS: 1-45.

14. The pharmaceutical composition of claim 10, wherein the at least one guide RNA comprises a crRNA sequence selected from the group consisting of SEQ ID NOS: 1-13.

15. The pharmaceutical composition of any one of claims 10-14, wherein the at least one guide RNA comprises a crRNA sequence that targets exon 1 of the NF-κB1 gene.

16. The pharmaceutical composition of claim 10-14, wherein the at least one guide RNA comprises a crRNA sequence that targets exon 2 of the NF-κB1 gene.

17. The pharmaceutical composition of claim 10-14, wherein the at least one guide RNA comprises a crRNA sequence that targets exon 3 of the NF-κB1 gene.

18. The pharmaceutical composition of claim 10-14, wherein the at least one guide RNA comprises a crRNA sequence that targets exon 4 of the NF-κB1 gene.

19. The pharmaceutical composition of claim 10-14, wherein the at least one guide RNA comprises a crRNA sequence that targets exon 5 of the NF-κB1 gene.

20. The pharmaceutical composition of claim 10-14, wherein the at least one guide RNA comprises a crRNA sequence that targets exon 6 of the NF-κB1 gene.

21. The pharmaceutical composition of claim 10-14, wherein the at least one guide RNA comprises a crRNA sequence that targets exon 7 of the NF-κB1 gene.

22. The pharmaceutical composition of claim 10-14, wherein the at least one guide RNA comprises a crRNA sequence that targets exon 8 of the NF-κBd1 gene.

23. The pharmaceutical composition of claim 10-14, wherein the at least one guide RNA comprises a crRNA sequence that targets exon 9 of the NF-κBd1 gene.

24. The pharmaceutical composition of claim 10-14, wherein the at least one guide RNA comprises a crRNA sequence that targets exon 10 of the NF-κB1 gene.

25. The pharmaceutical composition of claim 10-14, wherein the at least one guide RNA comprises a crRNA sequence that targets exon 11 of the NF-κB1 gene.

26. The pharmaceutical composition of claim 10-14, wherein the at least one guide RNA comprises a crRNA sequence that targets exon 12 of the NF-κB1 gene.

27. The pharmaceutical composition of claim 10-14, wherein the at least one guide RNA comprises a crRNA sequence that targets exon 13 of the NF-κB1 gene.

28. The pharmaceutical composition of claim 10-14, wherein the at least one guide RNA comprises a crRNA sequence that targets exon 14 of the NF-κB1 gene.

29. The pharmaceutical composition of claim 10-14, wherein the at least one guide RNA comprises a crRNA sequence that targets exon 15 of the NF-κB1 gene.

30. The pharmaceutical composition of claim 10-14, wherein the at least one guide RNA comprises a crRNA sequence that targets exon 16 of the NF-κB1 gene.

31. The pharmaceutical composition of claim 10-14, wherein the at least one guide RNA comprises a crRNA sequence that targets exon 17 of the NF-κB1 gene.

32. The pharmaceutical composition of claim 10-14, wherein the at least one guide RNA comprises a crRNA sequence that targets exon 18 of the NF-κB1 gene.

33. The pharmaceutical composition of claim 10-14, wherein the at least one guide RNA comprises a crRNA sequence that targets exon 19 of the NF-κB1 gene.

34. The pharmaceutical composition of claim 10-14, wherein the at least one guide RNA comprises a crRNA sequence that targets exon 20 of the NF-κB1 gene.

35. The pharmaceutical composition of claim 10-14, wherein the at least one guide RNA comprises a crRNA sequence that targets exon 21 of the NF-κB1 gene.

36. The pharmaceutical composition of claim 10-14, wherein the at least one guide RNA comprises a crRNA sequence that targets exon 22 of the NF-κB1 gene.

37. The pharmaceutical composition of claim 10-14, wherein the at least one guide RNA comprises a crRNA sequence that targets exon 23 of the NF-κB1 gene.

38. The pharmaceutical composition of claim 10-14, wherein the at least one guide RNA comprises a crRNA sequence that targets exon 24 of the NF-κB1 gene.

39. The pharmaceutical composition of any one of claims 1-9, wherein the gene associated with the production, blocking, or removal of ROS is a nuclear factor kappa B subunit 2 (NF-κB2) gene.

40. The pharmaceutical composition of claim 39, wherein the at least one guide RNA comprises a crRNA sequence selected from the group consisting of those sequences shown in FIG. 6 (SEQ ID NOS: 329-680 and 5323-5410).

41. The pharmaceutical composition of claim 39, wherein the at least one guide RNA comprises a crRNA sequence selected from the group consisting of SEQ ID NOS: 329-497.

42. The pharmaceutical composition of claim 39, wherein the at least one guide RNA comprises a crRNA sequence selected from the group consisting of SEQ ID NOS: 329-384.

43. The pharmaceutical composition of claim 39, wherein the at least one guide RNA comprises a crRNA sequence selected from the group consisting of SEQ ID NOS: 329-335.

44. The pharmaceutical composition of any one of claims 39-43, wherein the at least one guide RNA comprises a crRNA sequence that targets exon 1 of the NF-κB2 gene.

45. The pharmaceutical composition of claim 39-43, wherein the at least one guide RNA comprises a crRNA sequence that targets exon 2 of the NF-κB2 gene.

46. The pharmaceutical composition of claim 39-43, wherein the at least one guide RNA comprises a crRNA sequence that targets exon 3 of the NF-κB2 gene.

47. The pharmaceutical composition of claim 39-43, wherein the at least one guide RNA comprises a crRNA sequence that targets exon 4 of the NF-κB2 gene.

48. The pharmaceutical composition of claim 39-43, wherein the at least one guide RNA comprises a crRNA sequence that targets exon 5 of the NF-κB2 gene.

49. The pharmaceutical composition of claim 39-43, wherein the at least one guide RNA comprises a crRNA sequence that targets exon 6 of the NF-κB2 gene.

50. The pharmaceutical composition of claim 39-43, wherein the at least one guide RNA comprises a crRNA sequence that targets exon 7 of the NF-κB2 gene.

51. The pharmaceutical composition of claim 39-43, wherein the at least one guide RNA comprises a crRNA sequence that targets exon 8 of the NF-κB2 gene.

52. The pharmaceutical composition of claim 39-43, wherein the at least one guide RNA comprises a crRNA sequence that targets exon 9 of the NF-κB2 gene.

53. The pharmaceutical composition of claim 39-43, wherein the at least one guide RNA comprises a crRNA sequence that targets exon 10 of the NF-κB2 gene.

54. The pharmaceutical composition of claim 39-43, wherein the at least one guide RNA comprises a crRNA sequence that targets exon 11 of the NF-κB2 gene.

55. The pharmaceutical composition of claim 39-43, wherein the at least one guide RNA comprises a crRNA sequence that targets exon 12 of the NF-κB2 gene.

56. The pharmaceutical composition of claim 39-43, wherein the at least one guide RNA comprises a crRNA sequence that targets exon 13 of the NF-κB2 gene.

57. The pharmaceutical composition of claim 39-43, wherein the at least one guide RNA comprises a crRNA sequence that targets exon 14 of the NF-κB2 gene.

58. The pharmaceutical composition of claim 39-43, wherein the at least one guide RNA comprises a crRNA sequence that targets exon 15 of the NF-κB2 gene.

59. The pharmaceutical composition of claim 39-43, wherein the at least one guide RNA comprises a crRNA sequence that targets exon 16 of the NF-κB2 gene.

60. The pharmaceutical composition of claim 39-43, wherein the at least one guide RNA comprises a crRNA sequence that targets exon 17 of the NF-κB2 gene.

61. The pharmaceutical composition of claim 39-43, wherein the at least one guide RNA comprises a crRNA sequence that targets exon 18 of the NF-κB2 gene.

62. The pharmaceutical composition of claim 39-43, wherein the at least one guide RNA comprises a crRNA sequence that targets exon 19 of the NF-κB2 gene.

63. The pharmaceutical composition of claim 39-43, wherein the at least one guide RNA comprises a crRNA sequence that targets exon 20 of the NF-κB2 gene.

64. The pharmaceutical composition of claim 39-43, wherein the at least one guide RNA comprises a crRNA sequence that targets exon 21 of the NF-κB2 gene.

65. The pharmaceutical composition of claim 39-43, wherein the at least one guide RNA comprises a crRNA sequence that targets exon 22 of the NF-κB2 gene.

66. The pharmaceutical composition of claim 39-43, wherein the at least one guide RNA comprises a crRNA sequence that targets exon 23 of the NF-κB2 gene.

67. The pharmaceutical composition of any one of claims 1-9, wherein the gene associated with the production, blocking, or removal of ROS is selected from the group consisting of a 6-phosphogluconate dehydrogenase (6PGD) gene, an alcohol dehydrogenase (ADH) gene, an aldehyde dehydrogenase (ALDH2) gene, an AP-1 gene, a B-cell lymphoma-extra large (Bcl-XL) gene, a BCL2 apoptosis regulator (Bcl-2) gene, a Bcl-2-associated X protein (BAX) gene, a catalase (CAT) gene, a c-Jun N-terminal kinase (JNK) gene, a coenzyme Q10 gene, a CYP2E1 gene, a cytochrome c (Cyt c) gene, a F1Fo-ATP synthase gene, a ferritin heavy chain (FHC) gene, a glucose-6-phosphate dehydrogenase (G6PD) gene, a glutamylcysteine synthetase (GCS) gene, a glutathione (GSH) synthase gene, a glutathione peroxidase 1 (GPX1) gene, a glutathione peroxidase 2 (GPX2) gene, a glutathione peroxidase 3 (GPX3) gene, a glutathione peroxidase 4 (GPX4) gene, a glutathione peroxidase 5 (GPX5) gene, a glutathione peroxidase 6 (GPX6) gene, a glutathione peroxidase 7 (GPX7) gene, a glutathione peroxidase 8 (GPX8) gene, a glutathione reductase (GR) gene, a glycerol 3-phosphate dehydrogenase gene, a growth arrest and DNA damage (GADD 45) gene, a hypoxia-inducible factor 1-alpha (HIF-1α) gene, a mitogen-activated protein kinase (MAPK) gene, an NADH-ubiquinone oxidoreductase gene, an NADPH oxidase 4 (NOX4) gene, an NADPH oxidase 5 (NOX5) gene, a nuclear factor kappa-light-chain-enhancer of activated B cells (NF-κB) gene, a nuclear factor κB (NF-κB) essential modulator (NEMO) gene, a p46Shc (SHC isoform) gene, a p52Shc (SHC isoform) gene, a p53 upregulated modulator of apoptosis (PUMA) gene, a p66Shc (SHC isoform) gene, a phosphoinositide 3-kinase (PI3-K) gene, a proline oxidase (PIG6, POX) gene, a quinone oxidoreductase (PIG3, NQO1) gene, a respiratory complexes I gene, a respiratory complexes II gene, a respiratory complexes III gene, a respiratory complexes IV gene, a sestrin 1 (SESN1) gene, a sestrin 2 (SESN2) gene, an SHC adaptor protein 1 (SHC1) gene, a superoxide dismutase 1 (SOD1) gene, a superoxide dismutase 2 (SOD2) gene, a superoxide dismutase 3 (SOD3) gene, a TNF alpha induced protein 3 (TNFAIP3) gene, a tumor protein 53 (p53) gene, a tumor protein p53 inducible nuclear protein 1 (TP53INP1) gene, a ubiquinol-cytochrome c oxidoreductase gene, a 2B4 gene, an ABCA1 gene, an ACP5 gene, an ADAR-1 gene, an ADSS gene, an AIG1 gene, an AIM2 gene, an APOBEC3 gene, an ARRB2 gene, a B2M gene, a BCAS3 gene, a BMP4 gene, a C10orf32 gene, a C21orf33 gene, a CASP1 gene, a CCL5 gene, a CD160 gene, a Cd53 gene, a CDKN2A gene, a CHEK1 gene, a CNNM2 gene, a CNTNAP2 gene, a CSMD1 gene, a CTLA-4 gene, a CTSB gene, a C-type lectin receptors CLRs gene, a CXCL10 gene, a CYP17A1 gene, a DDX60 gene, a DYNC1I1 gene, a FOXO3a gene, a GPC6 gene, a GRN gene, an HCK gene, an HECW1 gene, an HLA gene, an IFI30 gene, an IFI44L gene, an IFI6 gene, an IFITM gene, an IFITM1/3 gene, an IFITM2 gene, an IFITM3 gene, an IL-18 gene, an IL-1α gene, an IL-1β gene, an interferon-γ gene, an interleukin-12 (IL-12) gene, an IRF gene, an IRF-1 gene, a gene, an IRF3 gene, an IRF7 gene, a LAG-3 gene, a LIPC gene, a MDA5/IFIH1 gene, a MPAK gene, a MYH9 gene, a MYO16 gene, a MYO5A gene, an NAIP gene, an NF-κB gene, an NLRC4 gene, a gene, an NLRP3 gene, a NOD2 gene, a gene, an NPL gene, an NR gene, a nucleotide oligomerization and binding domain NOD-like receptors gene, an OAS1 gene, an OAS2 gene, an OASL gene, a parkin gene (PARK2) gene, a PD-1 gene, a PLEKHG1 gene, av PRKCA gene, a PTBP1 gene, a PYCARD gene, a Pyrin-HIN (PYHIN) domain containing receptor gene (e.g. AIM2), a reactive oxygen species (ROS) gene, a retinoic acid inducible gene-I (RIG-I)-like receptor (RLRs) gene, an RFC3 gene, a RGS1 gene, a RIG-I/DDX58 gene, a SAMHD1 gene, a SF3A1/SF3B1 gene, a SFXN2 gene, a SLAMF7 gene, a SLC41A1 gene, a SLC8A1 gene, a SLCO3A1 gene, a STAT1 gene, a tetherin gene, a TLR5 gene, a TLR7 gene, a TLR9 gene, a Toll-like receptor (TLR) gene, a TREM2 gene, a TREX1 gene, a TRIM5 gene, a TTLL7 gene, and a TYROBP gene.

68. The pharmaceutical composition of any one of claims 1-67, wherein the RNA-guided nuclease or a nucleic acid encoding an RNA-guided nuclease is the RNA-guided nuclease.

69. The pharmaceutical composition of any one of claims 1-67, wherein the RNA-guided nuclease or a nucleic acid encoding an RNA-guided nuclease is DNA encoding the RNA-guided nuclease.

70. The pharmaceutical composition of any one of claims 1-67, wherein the RNA-guided nuclease or a nucleic acid encoding an RNA-guided nuclease is mRNA encoding the RNA-guided nuclease.

71. The pharmaceutical composition of any one of claims 1-70, wherein the RNA-guided nuclease is a Cas protein.

72. The pharmaceutical composition of claim 71, wherein the Cas protein is a Cas9 protein.

73. The pharmaceutical composition of claim 71, wherein the Cas9 protein is an S. pyogenes Cas9 polypeptide.

74. The pharmaceutical composition of claim 73, wherein the Cas9 protein is selected from the group consisting of esCas9, hfCas9, peCas9, and ARCas9.

75. The pharmaceutical composition of any one of claims 1-74, wherein the at least one guide RNA or a nucleic acid encoding at least one guide RNA is the at least one guide RNA.

76. The pharmaceutical composition of any one of claims 1-74, wherein the at least one guide RNA or a nucleic acid encoding at least one guide RNA is DNA encoding the at least one guide RNA.

77. The pharmaceutical composition of any one of claims 1-74, comprising a nucleic acid encoding both the RNA-guided nuclease and the at least one guide RNA.

78. The pharmaceutical composition of any one of claims 1-77, wherein the at least one guide RNA is a single guide RNA (sgRNA).

79. The pharmaceutical composition of any one of claims 1-78, wherein the at least one guide RNA targets a human gene.

80. The pharmaceutical composition of any one of claims 1-78, wherein the at least one guide RNA targets a canine gene.

81. The pharmaceutical composition of any one of claims 1-78, wherein the at least one guide RNA targets an equine gene.

82. The pharmaceutical composition of any one of claims 1-78, wherein the at least one guide RNA targets a feline gene.

83. The pharmaceutical composition of any one of claims 1-78, wherein the at least one guide RNA targets a mammalian gene.

84. The pharmaceutical composition of any one of claims 1-83, wherein the composition comprises one or more viral vectors collectively comprising the (i) RNA-guided nuclease or a nucleic acid encoding an RNA-guided nuclease, and (ii) at least one guide RNA or a nucleic acid encoding at least one guide RNA targeting a gene encoding the transmembrane receptor.

85. The pharmaceutical composition of claim 84, wherein the one of more viral vectors comprise a recombinant virus selected from a retrovirus, an adenovirus, an adeno-associated virus, a lentivirus, and a herpes simplex virus-1.

86. The pharmaceutical composition of claim 84, wherein the one of more viral vectors comprise a recombinant adeno-associated virus (AAV).

87. The pharmaceutical composition of claim 86, wherein the recombinant AAV is of serotype 5 (AAV5).

88. The pharmaceutical composition of claim 86, wherein the recombinant AAV is of serotype 6 (AAV6).

89. The pharmaceutical composition of any one of claims 1-83, wherein the composition comprises one or more lipid nanoparticles (LNP) collectively comprising the (i) RNA-guided nuclease or a nucleic acid encoding an RNA-guided nuclease, and (ii) at least one guide RNA or a nucleic acid encoding at least one guide RNA targeting a gene encoding the transmembrane receptor.

90. The pharmaceutical composition of claim 89, wherein the one or more LNP comprises:
a first plurality of LNP encapsulating the RNA-guided nuclease or a nucleic acid encoding an RNA-guided nuclease; and
a second plurality of LNP encapsulating the at least one guide RNA or a nucleic acid encoding at least one guide RNA.

91. The pharmaceutical composition of claim 89, wherein the one or more LNP comprises a plurality of LNP encapsulating both the (i) RNA-guided nuclease or a nucleic acid encoding an RNA-guided nuclease, and (ii) at least one guide RNA or a nucleic acid encoding at least one guide RNA targeting a gene encoding the transmembrane receptor.

92. The pharmaceutical composition of any one of claims 89-91, wherein the one or more LNP comprises a component selected from the group consisting of 3-(didodecylamino)-N1,N1,4-tridodecyl-1-piperazineethanamine (KL10), N1-[2-(didodecylamino)ethyl]-N1,N4,N4-tridodecyl-1,4-piperazinediethanamine (KL22), 14,25-ditridecyl-15,18,21,24-tetraaza-octatriacontane (KL25), 1,2-dilinoleyloxy-N,N-dimethylaminopropane (DLin-DMA), 2,2-dilinoleyl-4-dimethylaminomethyl-[1,3]-dioxolane (DLin-K-DMA), heptatriaconta-6,9,28,31-tetraen-19-yl 4-(dimethylamino)butanoate (DLin-MC3-DMA), 2,2-dilinoleyl-4-(2-dimethylaminoethyl)-[1,3]-dioxolane (DLin-KC2-DMA), 1,2-dioleyloxy-N,N-dimethylaminopropane (DODMA), 2-({8-[(3.beta.)-cholest-5-en-3-yloxy]octyl}oxy)-N,N-dimethyl-3-[(9Z,12Z)—octadeca-9,12-dien-1-yloxy]propan-1-amine (Octyl-CLinDMA), (2R)-2-({8-[(3.beta.)-cholest-5-en-3-yloxy]octyl}oxy)-N,N-dimethyl-3-[(9Z-,12Z)-octadeca-9,12-dien-1-yloxy]propan-1-amine (Octyl-CLinDMA (2R)), (2S)-2-({8-[(3.beta.)-cholest-5-en-3-yloxy]octyl}oxy)-N,N-dimethyl-3-[(9Z-,12Z)-octadeca-9,12-dien-1-yloxy]propan-1-amine (Octyl-CLinDMA (2S)), a lipid including a cyclic amine group, and a mixture thereof.

93. The pharmaceutical composition of any one of claims 89-92, wherein the LNP comprises a component selected from the group consisting of 1,2-dilinoleoyl-sn-glycero-3-phosphocholine (DLPC), 1,2-dimyristoyl-sn-glycero-phosphocholine (DMPC), 1,2-dioleoyl-sn-glycero-3-phosphocholine (DOPC), 1,2-dipalmitoyl-sn-glycero-3-phosphocholine (DPPC), 1,2-distearoyl-sn-glycero-3-phosphocholine (DSPC), 1,2-diundecanoyl-sn-glycero-phosphocholine (DUPC), 1-palmitoyl-2-oleoyl-sn-glycero-3-phosphocholine (POPC), 1,2-di-O-octadecenyl-sn-glycero-3-phosphocholine (18:0 Diether PC), 1-oleoyl-2-cholesterylhemisuccinoyl-sn-glycero-3-phosphocholine (OChemsPC), 1-hexadecyl-sn-glycero-3-phosphocholine (C16 Lyso PC), 1,2-dilinolenoyl-sn-glycero-3-phosphocholine, 1,2-diarachidonoyl-sn-glycero-3-phosphocholine, 1,2-didocosahexaenoyl-sn-glycero-3-phosphocholine, 1,2-dioleoyl-sn-glycero-3-phosphoethanolamine (DOPE), 1,2-diphytanoyl-sn-glycero-3-phosphoethanolamine (ME 16.0 PE), 1,2-distearoyl-sn-glycero-3-phosphoethanolamine, 1,2-dilinoleoyl-sn-glycero-3-phosphoethanolamine, 1,2-dilinolenoyl-sn-glycero-3-phosphoethanolamine, 1,2-diarachidonoyl-sn-glycero-3-phosphoethanolamine, 1,2-didocosahexaenoyl-sn-glycero-3-phosphoethanolamine, 1,2-dioleoyl-sn-glycero-3-phospho-rac-(1-glycerol) sodium salt (DOPG), sphingomyelin (SM), and a mixture thereof.

94. The pharmaceutical composition of any one of claims 89-93, wherein the LNP comprises a component selected from the group consisting of PEG-modified phosphatidylethanolamines, PEG-modified phosphatidic acids, PEG-modified ceramides, PEG-modified dialkylamines, PEG-modified diacylglycerols, PEG-modified dialkylglycerols, and mixtures thereof. For example, a PEG lipid may be PEG-c-DOMG, PEG-DMG, PEG-DLPE, PEG-DMPE, PEG-DPPC, PEG-DMA, a PEG-DSPE lipid, and a mixture thereof.

95. The pharmaceutical composition of any one of claims 89-94, wherein the LNP comprises a component selected from the group consisting of a cholesterol, fecosterol, stigmasterol, stigmastanol, sitosterol, β-sitosterol, lupeol, betulin, ursolic acid, oleanolic acid, campesterol, fucosterol, brassicasterol, ergosterol, 9,11-dehydroergosterol, tomatidine, tomatine, α-tocopherol, and a mixture thereof.

96. The pharmaceutical composition of any one of claims 1-83, wherein the composition comprises one or more liposomes collectively comprising the (i) RNA-guided nuclease or a nucleic acid encoding an RNA-guided nuclease, and (ii) at least one guide RNA or a nucleic acid encoding at least one guide RNA targeting a gene encoding the transmembrane receptor.

97. The pharmaceutical composition of claim 96, wherein the one or more liposomes comprises:
a first plurality of liposomes encapsulating the RNA-guided nuclease or a nucleic acid encoding an RNA-guided nuclease; and
a second plurality of liposomes encapsulating the at least one guide RNA or a nucleic acid encoding at least one guide RNA.

98. The pharmaceutical composition of claim 96, wherein the one or more liposomes comprises a plurality of liposomes encapsulating both the (i) RNA-guided nuclease or a nucleic acid encoding an RNA-guided nuclease, and (ii) at least one guide RNA or a nucleic acid encoding at least one guide RNA targeting a gene encoding the transmembrane receptor.

99. The pharmaceutical composition of any one of claims 1-83, wherein the composition comprises one or more virus-like particles collectively comprising the (i) RNA-guided nuclease or a nucleic acid encoding an RNA-guided nuclease, and (ii) at least one guide RNA or a nucleic acid encoding at least one guide RNA targeting a gene encoding the transmembrane receptor.

100. The pharmaceutical composition of claim 99, wherein the one or more virus-like particles comprises:
a first plurality of virus-like particles encapsulating the RNA-guided nuclease or a nucleic acid encoding an RNA-guided nuclease; and
a second plurality of virus-like particles encapsulating the at least one guide RNA or a nucleic acid encoding at least one guide RNA.

101. The pharmaceutical composition of claim 99, wherein the one or more virus-like particles comprises a plurality of virus-like particles encapsulating both the (i) RNA-guided nuclease or a nucleic acid encoding an RNA-guided nuclease, and (ii) at least one guide RNA or a nucleic acid encoding at least one guide RNA targeting a gene encoding the transmembrane receptor.

102. The pharmaceutical composition of any one of claims 1-101, wherein the composition is formulated for parenteral administration.

103. The pharmaceutical composition of any one of claims 1-101, wherein the composition is formulated for intra-articular injection within a joint of the subject.

104. A method for treating or preventing a joint disorder in a subject in need thereof, comprising:
administering a therapeutically effective amount of a pharmaceutical composition according to any one of claims 1-103 to the subject.

105. A method for treating or preventing free oxygen radicals in a subject in need thereof, comprising:
administering a therapeutically effective amount of a pharmaceutical composition according to any one of claims 1-103 to the subject.

The application's sequence listing, which the Patent Office published only in electronic form, follows.

SEQUENCE LISTING (5410 sequences)

SEQ ID NO: 1 - RNA, 20 nt, synthetic construct
  source 1..20: mol_type = other RNA
gtaggtagtactgtccacat

SEQ ID NO: 2 - RNA, 20 nt, synthetic construct
  source 1..20: mol_type = other RNA
ccgaagctggacaaacacag

SEQ ID NO: 3 - RNA, 20 nt, synthetic construct
  source 1..20: mol_type = other RNA
cctggtgggaaaacactgtg

SEQ ID NO: 4 - RNA, 20 nt, synthetic construct
  source 1..20: mol_type = other RNA
tttgttgagagttagcagtg

SEQ ID NO: 5 - RNA, 20 nt, synthetic construct
  source 1..20: mol_type = other RNA
ttgtcacatgaagtataccc

SEQ ID NO: 6 - RNA, 20 nt, synthetic construct
  source 1..20: mol_type = other RNA
actggaagcacgaatgacag

SEQ ID NO: 7 - RNA, 20 nt, synthetic construct
  source 1..20: mol_type = other RNA
atgacagaggcgtgtataag

SEQ ID NO: 8 - RNA, 20 nt, synthetic construct
  source 1..20: mol_type = other RNA
gacctcaccattcccaacgg

SEQ ID NO: 9 - RNA, 20 nt, synthetic construct
  source 1..20: mol_type = other RNA
ggagcacgacaacatctcat

SEQ ID NO: 10 - RNA, 20 nt, synthetic construct
  source 1..20: mol_type = other RNA
aggctatgcagcttgcaaag

SEQ ID NO: 11 - RNA, 20 nt, synthetic construct
  source 1..20: mol_type = other RNA
cagctggtggccatatctag

SEQ ID NO: 12 - RNA, 20 nt, synthetic construct
  source 1..20: mol_type = other RNA
aggagcaggactcagccgga

SEQ ID NO: 13 - RNA, 20 nt, synthetic construct
  source 1..20: mol_type = other RNA
tttaccgagtctctgaccag

SEQ ID NO: 14 - RNA, 20 nt, synthetic construct
  source 1..20: mol_type = other RNA
cttgtctatgaacatctgtg

SEQ ID NO: 15 - RNA, 20 nt, synthetic construct
  source 1..20: mol_type = other RNA
gggctcctgatcttgctctg

SEQ ID NO: 16 - RNA, 20 nt, synthetic construct
  source 1..20: mol_type = other RNA
cttggcagtgatcactaagc

SEQ ID NO: 17 - RNA, 20 nt, synthetic construct
  source 1..20: mol_type = other RNA
gtggacagtactacctacga

SEQ ID NO: 18 - RNA, 20 nt, synthetic construct
  source 1..20: mol_type = other RNA
tctcccagctgctatatgca

SEQ ID NO: 19 - RNA, 20 nt, synthetic construct
  source 1..20: mol_type = other RNA
gagtcatccaggtcatagag

SEQ ID NO: 20 - RNA, 20 nt, synthetic construct
  source 1..20: mol_type = other RNA
tggcgcagaaattaggtctg

SEQ ID NO: 21 - RNA, 20 nt, synthetic construct
  source 1..20: mol_type = other RNA
caggtagtccaccatgggat

SEQ ID NO: 22 - RNA, 20 nt, synthetic construct
  source 1..20: mol_type = other RNA
tgtgaaggcccatcccatgg

SEQ ID NO: 23 - RNA, 20 nt, synthetic construct
  source 1..20: mol_type = other RNA
ttgtctatgaacatctgtgg

SEQ ID NO: 24 - RNA, 20 nt, synthetic construct
  source 1..20: mol_type = other RNA
aagtaggaaatccatagtgt

SEQ ID NO: 25 - RNA, 20 nt, synthetic construct
  source 1..20: mol_type = other RNA
gggtatagcttcccacacta

SEQ ID NO: 26 - RNA, 20 nt, synthetic construct
  source 1..20: mol_type = other RNA
taagtaggaaatccatagtg

SEQ ID NO: 27 - RNA, 20 nt, synthetic construct
  source 1..20: mol_type = other RNA
gaactactaaatctaatgct

SEQ ID NO: 28 - RNA, 20 nt, synthetic construct
  source 1..20: mol_type = other RNA
agcagtgagatggcgctgga

SEQ ID NO: 29 - RNA, 20 nt, synthetic construct
  source 1..20: mol_type = other RNA
acttcttgaccaccccaacg

SEQ ID NO: 30 - RNA, 20 nt, synthetic construct
  source 1..20: mol_type = other RNA
atgggccttcacatacataa

SEQ ID NO: 31 - RNA, 20 nt, synthetic construct
  source 1..20: mol_type = other RNA
gtatgtgaaggcccatccca

SEQ ID NO: 32 - RNA, 20 nt, synthetic construct
  source 1..20: mol_type = other RNA
tcagggtgcaccaagagtcc

SEQ ID NO: 33 - RNA, 20 nt, synthetic construct
  source 1..20: mol_type = other RNA
atagatggcgtctgatacca

SEQ ID NO: 34 - RNA, 20 nt, synthetic construct
  source 1..20: mol_type = other RNA
ctgtgtttgtccagcttcgg

SEQ ID NO: 35 - RNA, 20 nt, synthetic construct
  source 1..20: mol_type = other RNA
gcaagatcaggagcccagcg

SEQ ID NO: 36 - RNA, 20 nt, synthetic construct
  source 1..20: mol_type = other RNA
tgtcaccgcgtagtcgaaaa

SEQ ID NO: 37 - RNA, 20 nt, synthetic construct
  source 1..20: mol_type = other RNA
cttttcgactacgcggtgac

SEQ ID NO: 38 - RNA, 20 nt, synthetic construct
  source 1..20: mol_type = other RNA
gcaaaacagagttacccaag

SEQ ID NO: 39 - RNA, 20 nt, synthetic construct
  source 1..20: mol_type = other RNA
ttgcacctagctgccaaaga

SEQ ID NO: 40 - RNA, 20 nt, synthetic construct
  source 1..20: mol_type = other RNA
cgtaggtagtactgtccaca

SEQ ID NO: 41 - RNA, 20 nt, synthetic construct
  source 1..20: mol_type = other RNA
caggggtgtggttccatcgt

SEQ ID NO: 42 - RNA, 20 nt, synthetic construct
  source 1..20: mol_type = other RNA
ttgtccataagtgttttgga

SEQ ID NO: 43 - RNA, 20 nt, synthetic construct
  source 1..20: mol_type = other RNA
aacacttatggacaactatg

SEQ ID NO: 44 - RNA, 20 nt, synthetic construct
  source 1..20: mol_type = other RNA
aggcagcgagtgggcctgag

SEQ ID NO: 45 - RNA, 20 nt, synthetic construct
  source 1..20: mol_type = other RNA
acctatttgctgccttgtgg

SEQ ID NO: 46 - RNA, 20 nt, synthetic construct
  source 1..20: mol_type = other RNA
cctgttggcagtgccatctg

SEQ ID NO: 47 - RNA, 20 nt, synthetic construct
  source 1..20: mol_type = other RNA
cactgtaactgctggaccca

SEQ ID NO: 48 - RNA, 20 nt, synthetic construct
  source 1..20: mol_type = other RNA
cttgcaaataggcaaggtca

SEQ ID NO: 49 - RNA, 20 nt, synthetic construct
  source 1..20: mol_type = other RNA
gtgaagctgccagtgctatc

SEQ ID NO: 50 - RNA, 20 nt, synthetic construct
  source 1..20: mol_type = other RNA
cacaaggcgcctggaacccg

SEQ ID NO: 51 - RNA, 20 nt, synthetic construct
  source 1..20: mol_type = other RNA
acagctggatgtgtgactgg

SEQ ID NO: 52 - RNA, 20 nt, synthetic construct
  source 1..20: mol_type = other RNA
tctaatgctgggatgaagca

SEQ ID NO: 53 - RNA, 20 nt, synthetic construct
  source 1..20: mol_type = other RNA
caatgcccttttcgactacg

SEQ ID NO: 54 - RNA, 20 nt, synthetic construct
  source 1..20: mol_type = other RNA
catgagaaatgatctgtacc

SEQ ID NO: 55 - RNA, 20 nt, synthetic construct
  source 1..20: mol_type = other RNA
ctacttcttgaccaccccaa

SEQ ID NO: 56 - RNA, 20 nt, synthetic construct
  source 1..20: mol_type = other RNA
atgctcaggagcagaagtcc

SEQ ID NO: 57 - RNA, 20 nt, synthetic construct
  source 1..20: mol_type = other RNA
ctcccagctgctatatgcag

SEQ ID NO: 58 - RNA, 20 nt, synthetic construct
  source 1..20: mol_type = other RNA
ctctcccagctgctatatgc

SEQ ID NO: 59 - RNA, 20 nt, synthetic construct
  source 1..20: mol_type = other RNA
ctggcgcagaaattaggtct

SEQ ID NO: 60 - RNA, 20 nt, synthetic construct
  source 1..20: mol_type = other RNA
gaatgacagaggcgtgtata

SEQ ID NO: 61 - RNA, 20 nt, synthetic construct
  source 1..20: mol_type = other RNA
aatgacagaggcgtgtataa

SEQ ID NO: 62 - RNA, 20 nt, synthetic construct
  source 1..20: mol_type = other RNA
caaggagatggacctcagcg

SEQ ID NO: 63 - RNA, 20 nt, synthetic construct
  source 1..20: mol_type = other RNA
tttcaagttggatgcattgg

SEQ ID NO: 64 - RNA, 20 nt, synthetic construct
  source 1..20: mol_type = other RNA
cagctggatgtgtgactgga

SEQ ID NO: 65 - RNA, 20 nt, synthetic construct
  source 1..20: mol_type = other RNA
ctctactatcctgaaatcaa

SEQ ID NO: 66 - RNA, 20 nt, synthetic construct
  source 1..20: mol_type = other RNA
atggatttcctacttatggt

SEQ ID NO: 67 - RNA, 20 nt, synthetic construct
  source 1..20: mol_type = other RNA
gcgccatctcactgctgtgc

SEQ ID NO: 68 - RNA, 20 nt, synthetic construct
  source 1..20: mol_type = other RNA
tggcaggctattgctcatca

SEQ ID NO: 69 - RNA, 20 nt, synthetic construct
  source 1..20: mol_type = other RNA
tggggctgacgtcaatgctc

SEQ ID NO: 70 - RNA, 20 nt, synthetic construct
  source 1..20: mol_type = other RNA
cacgacaacatctcattggc

SEQ ID NO: 71 - RNA, 20 nt, synthetic construct
  source 1..20: mol_type = other RNA
gaggatgaaggagttgtgcc

SEQ ID NO: 72 - RNA, 20 nt, synthetic construct
  source 1..20: mol_type = other RNA
agtgacagtgtctgcgacag

SEQ ID NO: 73 - RNA, 20 nt, synthetic construct
  source 1..20: mol_type = other RNA
ggtaaagctgagtttgcgga

SEQ ID NO: 74 - RNA, 20 nt, synthetic construct
  source 1..20: mol_type = other RNA
aggcaccaggtagtccacca

SEQ ID NO: 75 - RNA, 20 nt, synthetic construct
  source 1..20: mol_type = other RNA
ctgcatgcccacagcctggt

SEQ ID NO: 76 - RNA, 20 nt, synthetic construct
  source 1..20: mol_type = other RNA
agcagctctgcagcagacca

SEQ ID NO: 77 - RNA, 20 nt, synthetic construct
  source 1..20: mol_type = other RNA
tggcagcttcacaaggcgcc

SEQ ID NO: 78 - RNA, 20 nt, synthetic construct
  source 1..20: mol_type = other RNA
agctggatgtgtgactggag

SEQ ID NO: 79 - RNA, 20 nt, synthetic construct
  source 1..20: mol_type = other RNA
tacttgtctatgaacatctg

SEQ ID NO: 80 - RNA, 20 nt, synthetic construct
  source 1..20: mol_type = other RNA
gcttcggaggaaatctgact

SEQ ID NO: 81 - RNA, 20 nt, synthetic construct
  source 1..20: mol_type = other RNA
tagatttagtagttccagga

SEQ ID NO: 82 - RNA, 20 nt, synthetic construct
  source 1..20: mol_type = other RNA
agcccagcgaggccaccgtt

SEQ ID NO: 83 - RNA, 20 nt, synthetic construct
  source 1..20: mol_type = other RNA
agtgacctcaccattcccaa

SEQ ID NO: 84 - RNA, 20 nt, synthetic construct
  source 1..20: mol_type = other RNA
ggccaccgttgggaatggtg

SEQ ID NO: 85 - RNA, 20 nt, synthetic construct
  source 1..20: mol_type = other RNA
ccctcacaagttgagaatga

SEQ ID NO: 86 - RNA, 20 nt, synthetic construct
  source 1..20: mol_type = other RNA
agttacccaagcggtccaga

SEQ ID NO: 87 - RNA, 20 nt, synthetic construct
  source 1..20: mol_type = other RNA
ctgagccttctggaccgctt

SEQ ID NO: 88 - RNA, 20 nt, synthetic construct
  source 1..20: mol_type = other RNA
gctcatcatggctagatgaa

SEQ ID NO: 89 - RNA, 20 nt, synthetic construct
  source 1..20: mol_type = other RNA
aatgctcaggagcagaagtc

SEQ ID NO: 90 - RNA, 20 nt, synthetic construct
  source 1..20: mol_type = other RNA
tttgagaagagctgccagcc

SEQ ID NO: 91 - RNA, 20 nt, synthetic construct
  source 1..20: mol_type = other RNA
aggctcaaagttctccacca

SEQ ID NO: 92 - RNA, 20 nt, synthetic construct
  source 1..20: mol_type = other RNA
gatgactcttgggaaaatgc

SEQ ID NO: 93 - RNA, 20 nt, synthetic construct
  source 1..20: mol_type = other RNA
gtggaggccctgagacaaat

SEQ ID NO: 94 - RNA, 20 nt, synthetic construct
  source 1..20: mol_type = other RNA
aggcgagagaggcagcgagt

SEQ ID NO: 95 - RNA, 20 nt, synthetic construct
  source 1..20: mol_type = other RNA
cgcagacactgtcactgtct

SEQ ID NO: 96 - RNA, 20 nt, synthetic construct
  source 1..20: mol_type = other RNA
actcggtaaagctgagtttg

SEQ ID NO: 97 - RNA, 20 nt, synthetic construct
  source 1..20: mol_type = other RNA
aagatgatccatatttggga

SEQ ID NO: 98 - RNA, 20 nt, synthetic construct
  source 1..20: mol_type = other RNA
ggcaccaggtagtccaccat

SEQ ID NO: 99 - RNA, 20 nt, synthetic construct
  source 1..20: mol_type = other RNA
gaacaagaagtcttaccctc

SEQ ID NO: 100 - RNA, 20 nt, synthetic construct
  source 1..20: mol_type = other RNA
tgtataaggggctataatcc

SEQ ID NO: 101 - RNA, 20 nt, synthetic construct
  source 1..20: mol_type = other RNA
tctgctgcagagctgcttgg

SEQ ID NO: 102 - RNA, 20 nt, synthetic construct
  source 1..20: mol_type = other RNA
acatgagccgcaccacgctg

SEQ ID NO: 103 - RNA, 20 nt, synthetic construct
  source 1..20: mol_type = other RNA
atagcactggcagcttcaca

SEQ ID NO: 104 - RNA, 20 nt, synthetic construct
  source 1..20: mol_type = other RNA
tagatggcgtctgataccac

SEQ ID NO: 105 - RNA, 20 nt, synthetic construct
  source 1..20: mol_type = other RNA
cctcttcataaaatcgaatc

SEQ ID NO: 106 - RNA, 20 nt, synthetic construct
  source 1..20: mol_type = other RNA
cctctgtgtttgtccagctt

SEQ ID NO: 107 - RNA, 20 nt, synthetic construct
  source 1..20: mol_type = other RNA
agtcagatttcctccgaagc

SEQ ID NO: 108 - RNA, 20 nt, synthetic construct
  source 1..20: mol_type = other RNA
cagataaagaagaagtgcag

SEQ ID NO: 109 - RNA, 20 nt, synthetic construct
  source 1..20: mol_type = other RNA
ccgaaactatccgaaaaatt

SEQ ID NO: 110 - RNA, 20 nt, synthetic construct
  source 1..20: mol_type = other RNA
gcattagatttagtagttcc

SEQ ID NO: 111 - RNA, 20 nt, synthetic construct
  source 1..20: mol_type = other RNA
tcacaagttgagaatgaagg

SEQ ID NO: 112 - RNA, 20 nt, synthetic construct
  source 1..20: mol_type = other RNA
gatctactagaagtcacatc

SEQ ID NO: 113 - RNA, 20 nt, synthetic construct
  source 1..20: mol_type = other RNA
agtgatcactgccaagtgca

SEQ ID NO: 114 - RNA, 20 nt, synthetic construct
  source 1..20: mol_type = other RNA
cacccctgcatatagcagct

SEQ ID NO: 115 - RNA, 20 nt, synthetic construct
  source 1..20: mol_type = other RNA
ggctcaaagttctccaccag

SEQ ID NO: 116 - RNA, 20 nt, synthetic construct
  source 1..20: mol_type = other RNA
ggtggccatatctagaggcg

SEQ ID NO: 117 - RNA, 20 nt, synthetic construct
  source 1..20: mol_type = other RNA
agatatggccaccagctggc

SEQ ID NO: 118 - RNA, 20 nt, synthetic construct
  source 1..20: mol_type = other RNA
aaatcatcagatgtaaactc

SEQ ID NO: 119 - RNA, 20 nt, synthetic construct
  source 1..20: mol_type = other RNA
tctgatgatttactagcaca

SEQ ID NO: 120 - RNA, 20 nt, synthetic construct
  source 1..20: mol_type = other RNA
tggaaggagcaggactcagc

SEQ ID NO: 121 - RNA, 20 nt, synthetic construct
  source 1..20: mol_type = other RNA
ggtggtcttcactgggctgg

SEQ ID NO: 122 - RNA, 20 nt, synthetic construct
  source 1..20: mol_type = other RNA
gcctccacaaggcagcaaat

SEQ ID NO: 123 - RNA, 20 nt, synthetic construct
  source 1..20: mol_type = other RNA
aatgccccatgattatgggc

SEQ ID NO: 124 - RNA, 20 nt, synthetic construct
  source 1..20: mol_type = other RNA
ccacagatggcactgccaac

SEQ ID NO: 125 - RNA, 20 nt, synthetic construct
  source 1..20: mol_type = other RNA
gctctaatatttgaaggtat

SEQ ID NO: 126 - RNA, 20 nt, synthetic construct
  source 1..20: mol_type = other RNA
cgtttccgttatgtatgtga

SEQ ID NO: 127 - RNA, 20 nt, synthetic construct
  source 1..20: mol_type = other RNA
ccaggtagtccaccatggga

SEQ ID NO: 128 - RNA, 20 nt, synthetic construct
  source 1..20: mol_type = other RNA
ttcttttcactagaggcacc

SEQ ID NO: 129 - RNA, 20 nt, synthetic construct
  source 1..20: mol_type = other RNA
gcttgcaaataggcaaggtc

SEQ ID NO: 130 - RNA, 20 nt, synthetic construct
  source 1..20: mol_type = other RNA
gcttttcttccggatagcac

SEQ ID NO: 131 - RNA, 20 nt, synthetic construct
  source 1..20: mol_type = other RNA
cgtctgataccacgggttcc

SEQ ID NO: 132 - RNA, 20 nt, synthetic construct
  source 1..20: mol_type = other RNA
aggacagctggatgtgtgac

SEQ ID NO: 133 - RNA, 20 nt, synthetic construct
  source 1..20: mol_type = other RNA
aatttttcggatagtttcgg

SEQ ID NO: 134 - RNA, 20 nt, synthetic construct
  source 1..20: mol_type = other RNA
ggtgggattactttccatcc

SEQ ID NO: 135 - RNA, 20 nt, synthetic construct
  source 1..20: mol_type = other RNA
gaagagagtgctggagttca

SEQ ID NO: 136 - RNA, 20 nt, synthetic construct
  source 1..20: mol_type = other RNA
accttcattctcaacttgtg

SEQ ID NO: 137 - RNA, 20 nt, synthetic construct
  source 1..20: mol_type = other RNA
tgtggtggaggatttgctga

SEQ ID NO: 138 - RNA, 20 nt, synthetic construct
  source 1..20: mol_type = other RNA
tgttgtcgtgctccacagcc

SEQ ID NO: 139 - RNA, 20 nt, synthetic construct
  source 1..20: mol_type = other RNA
gaggctcaaagttctccacc

SEQ ID NO: 140 - RNA, 20 nt, synthetic construct
  source 1..20: mol_type = other RNA
ctatgacctggatgactctt

SEQ ID NO: 141 - RNA, 20 nt, synthetic construct
  source 1..20: mol_type = other RNA
atatctagaggcgtggttcc

SEQ ID NO: 142 - RNA, 20 nt, synthetic construct
  source 1..20: mol_type = other RNA
tggaaccacgcctctagata

SEQ ID NO: 143 - RNA, 20 nt, synthetic construct
  source 1..20: mol_type = other RNA
ctctagatatggccaccagc

SEQ ID NO: 144 - RNA, 20 nt, synthetic construct
  source 1..20: mol_type = other RNA
gctactctggcgcagaaatt

SEQ ID NO: 145 - RNA, 20 nt, synthetic construct
  source 1..20: mol_type = other RNA
tgggggtacagtcagagagc

SEQ ID NO: 146 - RNA, 20 nt, synthetic construct
  source 1..20: mol_type = other RNA
cctgagaggtggtcttcact

SEQ ID NO: 147 - RNA, 20 nt, synthetic construct
  source 1..20: mol_type = other RNA
cagcgagtgggcctgagagg

SEQ ID NO: 148 - RNA, 20 nt, synthetic construct
  source 1..20: mol_type = other RNA
ggcaccactggtcagagact

SEQ ID NO: 149 - RNA, 20 nt, synthetic construct
  source 1..20: mol_type = other RNA
ccttcctgcccataatcatg

SEQ ID NO: 150 - RNA, 20 nt, synthetic construct
  source 1..20: mol_type = other RNA
caactatgtgggaccagcaa

SEQ ID NO: 151 - RNA, 20 nt, synthetic construct
  source 1..20: mol_type = other RNA
attgttcagttggtcacaaa

SEQ ID NO: 152 - RNA, 20 nt, synthetic construct
  source 1..20: mol_type = other RNA
gtgttttcccaccaggctgt

SEQ ID NO: 153 - RNA, 20 nt, synthetic construct
  source 1..20: mol_type = other RNA
tgggaaaacactgtgaggat

SEQ ID NO: 154 - RNA, 20 nt, synthetic construct
  source 1..20: mol_type = other RNA
tacccgaccaccatgtcctt

SEQ ID NO: 155 - RNA, 20 nt, synthetic construct
  source 1..20: mol_type = other RNA
gggctataatcctggactct

SEQ ID NO: 156 - RNA, 20 nt, synthetic construct
  source 1..20: mol_type = other RNA
cttctgcttgcaaataggca

SEQ ID NO: 157 - RNA, 20 nt, synthetic construct
  source 1..20: mol_type = other RNA
tggtctgctgcagagctgct

SEQ ID NO: 158 - RNA, 20 nt, synthetic construct
  source 1..20: mol_type = other RNA
acttgtctatgaacatctgt

SEQ ID NO: 159 - RNA, 20 nt, synthetic construct
  source 1..20: mol_type = other RNA
ctttggagttttgaagacaa

SEQ ID NO: 160 - RNA, 20 nt, synthetic construct
  source 1..20: mol_type = other RNA
tatggatttcctacttatgg

SEQ ID NO: 161 - RNA, 20 nt, synthetic construct
  source 1..20: mol_type = other RNA
gaatctaaaaaggaccctga

SEQ ID NO: 162 - RNA, 20 nt, synthetic construct
  source 1..20: mol_type = other RNA
ttcccaacggtggcctcgct

SEQ ID NO: 163 - RNA, 20 nt, synthetic construct
  source 1..20: mol_type = other RNA
cgcgtagtcgaaaagggcat

SEQ ID NO: 164 - RNA, 20 nt, synthetic construct
  source 1..20: mol_type = other RNA
tcctgatccagacaaaaact

SEQ ID NO: 165 - RNA, 20 nt, synthetic construct
  source 1..20: mol_type = other RNA
ggtgtagcccatttgtctca

SEQ ID NO: 166 - RNA, 20 nt, synthetic construct
  source 1..20: mol_type = other RNA
cggtgtagcccatttgtctc

SEQ ID NO: 167 - RNA, 20 nt, synthetic construct
  source 1..20: mol_type = other RNA
cgaagcaattgaagtgatcc

SEQ ID NO: 168 - RNA, 20 nt, synthetic construct
  source 1..20: mol_type = other RNA
cccagtgaagaccacctctc

SEQ ID NO: 169 - RNA, 20 nt, synthetic construct
  source 1..20: mol_type = other RNA
cctcacagtgttttcccacc

SEQ ID NO: 170 - RNA, 20 nt, synthetic construct
  source 1..20: mol_type = other RNA
gggatctgcactgtaactgc

SEQ ID NO: 171 - RNA, 20 nt, synthetic construct
  source 1..20: mol_type = other RNA
tccaccttctgcttgcaaat

SEQ ID NO: 172 - RNA, 20 nt, synthetic construct
  source 1..20: mol_type = other RNA
ggtggaggggaccggcagct

SEQ ID NO: 173 - RNA, 20 nt, synthetic construct
  source 1..20: mol_type = other RNA
gtaagaatggacaggacagc

SEQ ID NO: 174 - RNA, 20 nt, synthetic construct
  source 1..20: mol_type = other RNA
ggaggcatgtttggtagtgg

SEQ ID NO: 175 - RNA, 20 nt, synthetic construct
  source 1..20: mol_type = other RNA
gtcactctaacgtatgcaac

SEQ ID NO: 176 - RNA, 20 nt, synthetic construct
  source 1..20: mol_type = other RNA
ctgccaagtgcaagggcgtc

SEQ ID NO: 177 - RNA, 20 nt, synthetic construct
  source 1..20: mol_type = other RNA
cactaagcaggaagatgtgg

SEQ ID NO: 178 - RNA, 20 nt, synthetic construct
  source 1..20: mol_type = other RNA
atgtggtggaggatttgctg

SEQ ID NO: 179 - RNA, 20 nt, synthetic construct
  source 1..20: mol_type = other RNA
gcggtccagaaggctcaggt

SEQ ID NO: 180 - RNA, 20 nt, synthetic construct
  source 1..20: mol_type = other RNA
cttgaccaccccaacgggga

SEQ ID NO: 181 - RNA, 20 nt, synthetic construct
  source 1..20: mol_type = other RNA
gctgctgctggtggccgctg

SEQ ID NO: 182 - RNA, 20 nt, synthetic construct
  source 1..20: mol_type = other RNA
caggtgcagtgctgtgcgcc

SEQ ID NO: 183 - RNA, 20 nt, synthetic construct
  source 1..20: mol_type = other RNA
ctgcatatagcagctgggag

SEQ ID NO: 184 - RNA, 20 nt, synthetic construct
  source 1..20: mol_type = other RNA
cagctgggagagggtccacc

SEQ ID NO: 185 - RNA, 20 nt, synthetic construct
  source 1..20: mol_type = other RNA
gagaagagctgccagcctgg

SEQ ID NO: 186 - RNA, 20 nt, synthetic construct
  source 1..20: mol_type = other RNA
ggatacttaataatgccttc

SEQ ID NO: 187 - RNA, 20 nt, synthetic construct
  source 1..20: mol_type = other RNA
gggtacagtcagagagctgg

SEQ ID NO: 188 - RNA, 20 nt, synthetic construct
  source 1..20: mol_type = other RNA
agaggtggtcttcactgggc

SEQ ID NO: 189 - RNA, 20 nt, synthetic construct
  source 1..20: mol_type = other RNA
tgttcaggccttcccaaata

SEQ ID NO: 190 - RNA, 20 nt, synthetic construct
  source 1..20: mol_type = other RNA
ccatcccatggtggactacc

SEQ ID NO: 191 - RNA, 20 nt, synthetic construct
  source 1..20: mol_type = other RNA
aactgctggacccaaggaca

SEQ ID NO: 192 - RNA, 20 nt, synthetic construct
  source 1..20: mol_type = other RNA
ttacccgaccaccatgtcct

SEQ ID NO: 193 - RNA, 20 nt, synthetic construct
  source 1..20: mol_type = other RNA
ggaggggaccggcagctggg

SEQ ID NO: 194 - RNA, 20 nt, synthetic construct
  source 1..20: mol_type = other RNA
agatggacctcagcgtggtg

SEQ ID NO: 195 - RNA, 20 nt, synthetic construct
  source 1..20: mol_type = other RNA
ttttcaagttggatgcattg

SEQ ID NO: 196 - RNA, 20 nt, synthetic construct
  source 1..20: mol_type = other RNA
tggatgtgtgactggagggg

SEQ ID NO: 197 - RNA, 20 nt, synthetic construct
  source 1..20: mol_type = other RNA
ccagattcgattttatgaag

SEQ ID NO: 198 - RNA, 20 nt, synthetic construct
  source 1..20: mol_type = other RNA
gctggaggcggaggcatgtt

SEQ ID NO: 199 - RNA, 20 nt, synthetic construct
  source 1..20: mol_type = other RNA
ctgtcaccgcgtagtcgaaa

SEQ ID NO: 200 - RNA, 20 nt, synthetic construct
  source 1..20: mol_type = other RNA
ccttcattctcaacttgtga

SEQ ID NO: 201 - RNA, 20 nt, synthetic construct
  source 1..20: mol_type = other RNA
tatcttactcaagcacaaaa

SEQ ID NO: 202 - RNA, 20 nt, synthetic construct
  source 1..20: mol_type = other RNA
gccaccagcagcagcaaaca

SEQ ID NO: 203 - RNA, 20 nt, synthetic construct
  source 1..20: mol_type = other RNA
agcattgacgtcagccccag

SEQ ID NO: 204 - RNA, 20 nt, synthetic construct
  source 1..20: mol_type = other RNA
agctgctatatgcaggggtg

SEQ ID NO: 205 - RNA, 20 nt, synthetic construct
  source 1..20: mol_type = other RNA
tgggagagggtccaccaggc

SEQ ID NO: 206 - RNA, 20 nt, synthetic construct
  source 1..20: mol_type = other RNA
tctggcgcagaaattaggtc

SEQ ID NO: 207 - RNA, 20 nt, synthetic construct
  source 1..20: mol_type = other RNA
ctctctcgcctgcctccaca

SEQ ID NO: 208 - RNA, 20 nt, synthetic construct
  source 1..20: mol_type = other RNA
taggttgctctaatatttga

SEQ ID NO: 209 - RNA, 20 nt, synthetic construct
  source 1..20: mol_type = other RNA
gtgggaaaacactgtgagga

SEQ ID NO: 210 - RNA, 20 nt, synthetic construct
  source 1..20: mol_type = other RNA
ctttgtgacaaagttcagaa

SEQ ID NO: 211 - RNA, 20 nt, synthetic construct
  source 1..20: mol_type = other RNA
ggaagaaaatggtggagtct

SEQ ID NO: 212 - RNA, 20 nt, synthetic construct
  source 1..20: mol_type = other RNA
ggcggaggcatgtttggtag

SEQ ID NO: 213 - RNA, 20 nt, synthetic construct
  source 1..20: mol_type = other RNA
gagcccagcgaggccaccgt

SEQ ID NO: 214 - RNA, 20 nt, synthetic construct
  source 1..20: mol_type = other RNA
ggaacaaaagaagagagtgc

SEQ ID NO: 215 - RNA, 20 nt, synthetic construct
  source 1..20: mol_type = other RNA
catcctgcacagcagtgaga

SEQ ID NO: 216 - RNA, 20 nt, synthetic construct
  source 1..20: mol_type = other RNA
gtgatcactgccaagtgcaa

SEQ ID NO: 217 - RNA, 20 nt, synthetic construct
  source 1..20: mol_type = other RNA
tacttcttgaccaccccaac

SEQ ID NO: 218 - RNA, 20 nt, synthetic construct
  source 1..20: mol_type = other RNA
gcctgagaggtggtcttcac

SEQ ID NO: 219 - RNA, 20 nt, synthetic construct
  source 1..20: mol_type = other RNA
cagtgtctgcgacagcggcg

SEQ ID NO: 220 - RNA, 20 nt, synthetic construct
  source 1..20: mol_type = other RNA
aatattgtatgagtcaaaga

SEQ ID NO: 221 - RNA, 20 nt, synthetic construct
  source 1..20: mol_type = other RNA
ccaccaggctgtgggcatgc

SEQ ID NO: 222 - RNA, 20 nt, synthetic construct
  source 1..20: mol_type = other RNA
cctgcatgcccacagcctgg

SEQ ID NO: 223 - RNA, 20 nt, synthetic construct
  source 1..20: mol_type = other RNA
ggacccaaggacatggtggt

SEQ ID NO: 224 - RNA, 20 nt, synthetic construct
  source 1..20: mol_type = other RNA
gacccaaggacatggtggtc

SEQ ID NO: 225 - RNA, 20 nt, synthetic construct
  source 1..20: mol_type = other RNA
gcctatttgcaagcagaagg

SEQ ID NO: 226 - RNA, 20 nt, synthetic construct
  source 1..20: mol_type = other RNA
gaaaatggtggagtctggga

SEQ ID NO: 227 - RNA, 20 nt, synthetic construct
  source 1..20: mol_type = other RNA
atttcaggatagtagaggaa

SEQ ID NO: 228 - RNA, 20 nt, synthetic construct
  source 1..20: mol_type = other RNA
gccgaaactatccgaaaaat

SEQ ID NO: 229 - RNA, 20 nt, synthetic construct
  source 1..20: mol_type = other RNA
aaagtaatcccaccataagt

SEQ ID NO: 230 - RNA, 20 nt, synthetic construct
  source 1..20: mol_type = other RNA
ctttttagattcagtgtcca

SEQ ID NO: 231 - RNA, 20 nt, synthetic construct
  source 1..20: mol_type = other RNA
cacttttgtcacaaccttca

SEQ ID NO: 232 - RNA, 20 nt, synthetic construct
  source 1..20: mol_type = other RNA
tttcaataactttcccaaag

SEQ ID NO: 233 - RNA, 20 nt, synthetic construct
  source 1..20: mol_type = other RNA
agataacctctttctagaga

SEQ ID NO: 234 - RNA, 20 nt, synthetic construct
  source 1..20: mol_type = other RNA
tgctgtgcaggatgagaatg

SEQ ID NO: 235 - RNA, 20 nt, synthetic construct
  source 1..20: mol_type = other RNA
ctcttgggaaaatgcaggag

SEQ ID NO: 236 - RNA, 20 nt, synthetic construct
  source 1..20: mol_type = other RNA
atagttgtccataagtgttt

SEQ ID NO: 237 - RNA, 20 nt, synthetic construct
  source 1..20: mol_type = other RNA
ctggatcacttcaattgctt

SEQ ID NO: 238 - RNA, 20 nt, synthetic construct
  source 1..20: mol_type = other RNA
gggcaggaaggacctctaga

SEQ ID NO: 239 - RNA, 20 nt, synthetic construct
  source 1..20: mol_type = other RNA
agaagtatttcaaccacaga

SEQ ID NO: 240 - RNA, 20 nt, synthetic construct
  source 1..20: mol_type = other RNA
agcaaaggttattgttcagt

SEQ ID NO: 241 - RNA, 20 nt, synthetic construct
  source 1..20: mol_type = other RNA
tgctggacccaaggacatgg

SEQ ID NO: 242 - RNA, 20 nt, synthetic construct
  source 1..20: mol_type = other RNA
atttgcaagcagaaggtgga

SEQ ID NO: 243 - RNA, 20 nt, synthetic construct
  source 1..20: mol_type = other RNA
tgaaaattgtaagaatggac

SEQ ID NO: 244 - RNA, 20 nt, synthetic construct
  source 1..20: mol_type = other RNA
agctggacaaacacagaggc

SEQ ID NO: 245 - RNA, 20 nt, synthetic construct
  source 1..20: mol_type = other RNA
gaagctcatgcccaattttt

SEQ ID NO: 246 - RNA, 20 nt, synthetic construct
  source 1..20: mol_type = other RNA
cccaatttttcggatagttt

SEQ ID NO: 247 - RNA, 20 nt, synthetic construct
  source 1..20: mol_type = other RNA
ggagggggcactggaagtac

SEQ ID NO: 248 - RNA, 20 nt, synthetic construct
  source 1..20: mol_type = other RNA
ggaactactaaatctaatgc

SEQ ID NO: 249 - RNA, 20 nt, synthetic construct
  source 1..20: mol_type = other RNA
tgaaaccacagagcaagatc

SEQ ID NO: 250 - RNA, 20 nt, synthetic construct
  source 1..20: mol_type = other RNA
ccaagcggtccagaaggctc

SEQ ID NO: 251 - RNA, 20 nt, synthetic construct
  source 1..20: mol_type = other RNA
catgtccttctttggcagct

SEQ ID NO: 252 - RNA, 20 nt, synthetic construct
  source 1..20: mol_type = other RNA
ccagcagcagcaaacatggc

SEQ ID NO: 253 - RNA, 20 nt, synthetic construct
  source 1..20: mol_type = other RNA
gccatgtttgctgctgctgg

SEQ ID NO: 254 - RNA, 20 nt, synthetic construct
  source 1..20: mol_type = other RNA
tgcatatagcagctgggaga

SEQ ID NO: 255 - RNA, 20 nt, synthetic construct
  source 1..20: mol_type = other RNA
tctatgacctggatgactct

SEQ ID NO: 256 - RNA, 20 nt, synthetic construct
  source 1..20: mol_type = other RNA
caggtatttgacatattaaa

SEQ ID NO: 257 - RNA, 20 nt, synthetic construct
  source 1..20: mol_type = other RNA
gatgtaaactctggctcata

SEQ ID NO: 258 - RNA, 20 nt, synthetic construct
  source 1..20: mol_type = other RNA
agagtagcccagtttttgtc

SEQ ID NO: 259 - RNA, 20 nt, synthetic construct
  source 1..20: mol_type = other RNA
ggtggaggccctgagacaaa

SEQ ID NO: 260 - RNA, 20 nt, synthetic construct
  source 1..20: mol_type = other RNA
atttgctgccttgtggaggc

SEQ ID NO: 261 - RNA, 20 nt, synthetic construct
  source 1..20: mol_type = other RNA
agttagcagtgaggcaccac

SEQ ID NO: 262 - RNA, 20 nt, synthetic construct
  source 1..20: mol_type = other RNA
acaaaatgccccatgattat

SEQ ID NO: 263 - RNA, 20 nt, synthetic construct
  source 1..20: mol_type = other RNA
tgctctaatatttgaaggta

SEQ ID NO: 264 - RNA, 20 nt, synthetic construct
  source 1..20: mol_type = other RNA
ccaggctgtgggcatgcagg

SEQ ID NO: 265 - RNA, 20 nt, synthetic construct
  source 1..20: mol_type = other RNA
ccacctgcatgcccacagcc

SEQ ID NO: 266 - RNA, 20 nt, synthetic construct
  source 1..20: mol_type = other RNA
cttgcctatttgcaagcaga

SEQ ID NO: 267 - RNA, 20 nt, synthetic construct
  source 1..20: mol_type = other RNA
tatttgcaagcagaaggtgg

SEQ ID NO: 268 - RNA, 20 nt, synthetic construct
  source 1..20: mol_type = other RNA
tctgcagcagaccaaggaga

SEQ ID NO: 269 - RNA, 20 nt, synthetic construct
  source 1..20: mol_type = other RNA
cactatggatttcctactta

SEQ ID NO: 270 - RNA, 20 nt, synthetic construct
  source 1..20: mol_type = other RNA
attcccaacggtggcctcgc

SEQ ID NO: 271 - RNA, 20 nt, synthetic construct
  source 1..20: mol_type = other RNA
actgctgtgcaggatgagaa

SEQ ID NO: 272 - RNA, 20 nt, synthetic construct
  source 1..20: mol_type = other RNA
ctgctgtgcaggatgagaat

SEQ ID NO: 273 - RNA, 20 nt, synthetic construct
  source 1..20: mol_type = other RNA
tgcaggatgagaatggggac

SEQ ID NO: 274 - RNA, 20 nt, synthetic construct
  source 1..20: mol_type = other RNA
tggaggatttgctgagggct

SEQ ID NO: 275 - RNA, 20 nt, synthetic construct
  source 1..20: mol_type = other RNA
agacaaaaactgggctactc

SEQ ID NO: 276 - RNA, 20 nt, synthetic construct
  source 1..20: mol_type = other RNA
tgctccttccaaaacactta

SEQ ID NO: 277 - RNA, 20 nt, synthetic construct
  source 1..20: mol_type = other RNA
tcactgggctggaggctgcc

SEQ ID NO: 278 - RNA, 20 nt, synthetic construct
  source 1..20: mol_type = other RNA
aactgaacaataacctttgc

SEQ ID NO: 279 - RNA, 20 nt, synthetic construct
  source 1..20: mol_type = other RNA
agtgttttcccaccaggctg

SEQ ID NO: 280 - RNA, 20 nt, synthetic construct
  source 1..20: mol_type = other RNA
tttgcaagcagaaggtggag

SEQ ID NO: 281 - RNA, 20 nt, synthetic construct
  source 1..20: mol_type = other RNA
cacgctgaggtccatctcct

SEQ ID NO: 282 - RNA, 20 nt, synthetic construct
  source 1..20: mol_type = other RNA
attttcaagttggatgcatt

SEQ ID NO: 283 - RNA, 20 nt, synthetic construct
  source 1..20: mol_type = other RNA
cattcttacaattttcaagt

SEQ ID NO: 284 - RNA, 20 nt, synthetic construct
  source 1..20: mol_type = other RNA
gcacagcagtgagatggcgc

SEQ ID NO: 285 - RNA, 20 nt, synthetic construct
  source 1..20: mol_type = other RNA
ggaggatttgctgagggctg

SEQ ID NO: 286 - RNA, 20 nt, synthetic construct
  source 1..20: mol_type = other RNA
tacagtcagagagctggtgg

SEQ ID NO: 287 - RNA, 20 nt, synthetic construct
  source 1..20: mol_type = other RNA
aattttcaagttggatgcat

SEQ ID NO: 288 - RNA, 20 nt, synthetic construct
  source 1..20: mol_type = other RNA
ggtggagtctgggaaggatt

SEQ ID NO: 289 - RNA, 20 nt, synthetic construct
  source 1..20: mol_type = other RNA
ttttcggatagtttcggcgg

SEQ ID NO: 290 - RNA, 20 nt, synthetic construct
  source 1..20: mol_type = other RNA
atgtttggtagtggcggtgg

SEQ ID NO: 291 - RNA, 20 nt, synthetic construct
  source 1..20: mol_type = other RNA
aaaaacactgtaaacctctt

SEQ ID NO: 292 - RNA, 20 nt, synthetic construct
  source 1..20: mol_type = other RNA
agaagagagtgctggagttc

SEQ ID NO: 293 - RNA, 20 nt, synthetic construct
  source 1..20: mol_type = other RNA
aggagacgtgaagatgctgc

SEQ ID NO: 294 - RNA, 20 nt, synthetic construct
  source 1..20: mol_type = other RNA
tgctgctgctggtggccgct

SEQ ID NO: 295 - RNA, 20 nt, synthetic construct
  source 1..20: mol_type = other RNA
ggcaggctgcctgctcctgg

SEQ ID NO: 296 - RNA, 20 nt, synthetic construct
  source 1..20: mol_type = other RNA
ctttgagcctctctatgacc

SEQ ID NO: 297 - RNA, 20 nt, synthetic construct
  source 1..20: mol_type = other RNA
ttcctgatccagacaaaaac

SEQ ID NO: 298 - RNA, 20 nt, synthetic construct
  source 1..20: mol_type = other RNA
aggaagaaaatggtggagtc

SEQ ID NO: 299 - RNA, 20 nt, synthetic construct
  source 1..20: mol_type = other RNA
ggcactggaagtacaggtcc

SEQ ID NO: 300 - RNA, 20 nt, synthetic construct
  source 1..20: mol_type = other RNA
gatcactaagcaggaagatg

SEQ ID NO: 301 - RNA, 20 nt, synthetic construct
  source 1..20: mol_type = other RNA
gtggaggatttgctgagggc

SEQ ID NO: 302 - RNA, 20 nt, synthetic construct
  source 1..20: mol_type = other RNA
cctgagccttctggaccgct

SEQ ID NO: 303 - RNA, 20 nt, synthetic construct
  source 1..20: mol_type = other RNA
ttgctgctgctggtggccgc

SEQ ID NO: 304 - RNA, 20 nt, synthetic construct
  source 1..20: mol_type = other RNA
cacagcactgcacctggctg

SEQ ID NO: 305 - RNA, 20 nt, synthetic construct
  source 1..20: mol_type = other RNA
ataagtgttttggaaggagc

SEQ ID NO: 306 - RNA, 20 nt, synthetic construct
  source 1..20: mol_type = other RNA
aatattagagcaacctaaac

SEQ ID NO: 307 - RNA, 20 nt, synthetic construct
  source 1..20: mol_type = other RNA
aggtggaggggaccggcagc

SEQ ID NO: 308 - RNA, 20 nt, synthetic construct
  source 1..20: mol_type = other RNA
catggacactgaatctaaaa

SEQ ID NO: 309 - RNA, 20 nt, synthetic construct
  source 1..20: mol_type = other RNA
aaaacactgtaaacctcttt

SEQ ID NO: 310 - RNA, 20 nt, synthetic construct
  source 1..20: mol_type = other RNA
ggctaaattttgccttctag

SEQ ID NO: 311 - RNA, 20 nt, synthetic construct
  source 1..20: mol_type = other RNA
cttcttgttcttttcactag

SEQ ID NO: 312 - RNA, 20 nt, synthetic construct
  source 1..20: mol_type = other RNA
gatagtttcggcggtggtag

SEQ ID NO: 313 - RNA, 20 nt, synthetic construct
  source 1..20: mol_type = other RNA
ttggtagtggcggtggagga

SEQ ID NO: 314 - RNA, 20 nt, synthetic construct
  source 1..20: mol_type = other RNA
gcccagtttttgtctggatc

SEQ ID NO: 315 - RNA, 20 nt, synthetic construct
  source 1..20: mol_type = other RNA
tggggccgacctgagccttc

SEQ ID NO: 316 - RNA, 20 nt, synthetic construct
  source 1..20: mol_type = other RNA
acacccctgcatatagcagc

SEQ ID NO: 317 - RNA, 20 nt, synthetic construct
  source 1..20: mol_type = other RNA
aacaaaatgccccatgatta

SEQ ID NO: 318 - RNA, 20 nt, synthetic construct
  source 1..20: mol_type = other RNA
gcagctcttctcaaagcagc

SEQ ID NO: 319 - RNA, 20 nt, synthetic construct
  source 1..20: mol_type = other RNA
atctgtggttgaaatacttc

SEQ ID NO: 320 - RNA, 20 nt, synthetic construct
  source 1..20: mol_type = other RNA
catgtttacagcttttcttc

SEQ ID NO: 321 - RNA, 20 nt, synthetic construct
  source 1..20: mol_type = other RNA
tcacttttgtcacaaccttc

SEQ ID NO: 322 - RNA, 20 nt, synthetic construct
  source 1..20: mol_type = other RNA
cctgccatgtttgctgctgc

SEQ ID NO: 323 - RNA, 20 nt, synthetic construct
  source 1..20: mol_type = other RNA
cattttcccaagagtcatcc

SEQ ID NO: 324 - RNA, 20 nt, synthetic construct
  source 1..20: mol_type = other RNA
ctttgatttcaggatagtag

SEQ ID NO: 325 - RNA, 20 nt, synthetic construct
  source 1..20: mol_type = other RNA
ggtagtggtgctggagctgg

SEQ ID NO: 326 - RNA, 20 nt, synthetic construct
  source 1..20: mol_type = other RNA
cgggcgcacagcactgcacc

SEQ ID NO: 327 - RNA, 20 nt, synthetic construct
  source 1..20: mol_type = other RNA
tggtagtggcggtggaggag

SEQ ID NO: 328 - RNA, 20 nt, synthetic construct
  source 1..20: mol_type = other RNA
ggtggtagtggtgctggagc

SEQ ID NO: 329 - RNA, 20 nt, synthetic construct
  source 1..20: mol_type = other RNA
tgcgtacgggagccagtcag

SEQ ID NO: 330 - RNA, 20 nt, synthetic construct
  source 1..20: mol_type = other RNA
gagtcgctatcagaggtagg

SEQ ID NO: 331 - RNA, 20 nt, synthetic construct
  source 1..20: mol_type = other RNA
cgacagacaacctcacccag

SEQ ID NO: 332 - RNA, 20 nt, synthetic construct
  source 1..20: mol_type = other RNA
cgagggaccagccaagatcg

SEQ ID NO: 333 - RNA, 20 nt, synthetic construct
  source 1..20: mol_type = other RNA
ggggggtgtccggaacacaa

SEQ ID NO: 334 - RNA, 20 nt, synthetic construct
  source 1..20: mol_type = other RNA
ggtgacgccgtagtcgagta

SEQ ID NO: 335 - RNA, 20 nt, synthetic construct
  source 1..20: mol_type = other RNA
actcgactacggcgtcaccg

SEQ ID NO: 336 - RNA, 20 nt, synthetic construct
  source 1..20: mol_type = other RNA
ctccttgggttccacaatgg

SEQ ID NO: 337 - RNA, 20 nt, synthetic construct
  source 1..20: mol_type = other RNA
tggctccttgggttccacaa

SEQ ID NO: 338 - RNA, 20 nt, synthetic construct
  source 1..20: mol_type = other RNA
tgatggatctgagtatagtg

SEQ ID NO: 339 - RNA, 20 nt, synthetic construct
  source 1..20: mol_type = other RNA
ctgcaactgaaacgcaagcg

SEQ ID NO: 340 - RNA, 20 nt, synthetic construct
  source 1..20: mol_type = other RNA
gttccacgatcaccaggtag

SEQ ID NO: 341 - RNA, 20 nt, synthetic construct
  source 1..20: mol_type = other RNA
ctgttccacgatcaccaggt

SEQ ID NO: 342 - RNA, 20 nt, synthetic construct
  source 1..20: mol_type = other RNA
cattgaggttcggttctatg

SEQ ID NO: 343 - RNA, 20 nt, synthetic construct
  source 1..20: mol_type = other RNA
atcttcatcttgtgataggg

SEQ ID NO: 344 - RNA, 20 nt, synthetic construct
  source 1..20: mol_type = other RNA
atgtgggagccacccccgaa

SEQ ID NO: 345 - RNA, 20 nt, synthetic construct
  source 1..20: mol_type = other RNA
ttcgggggtggctcccacat

SEQ ID NO: 346 - RNA, 20 nt, synthetic construct
  source 1..20: mol_type = other RNA
gcccgagccctactcgacta

SEQ ID NO: 347 - RNA, 20 nt, synthetic construct
  source 1..20: mol_type = other RNA
ctgacggcgcaggacgagaa

SEQ ID NO: 348 - RNA, 20 nt, synthetic construct
  source 1..20: mol_type = other RNA
gatcacggggcagacgagtg

SEQ ID NO: 349 - RNA, 20 nt, synthetic construct
  source 1..20: mol_type = other RNA
ctagacgggccagaagccca

SEQ ID NO: 350 - RNA, 20 nt, synthetic construct
  source 1..20: mol_type = other RNA
gtgaaggaagacagtgcgta

SEQ ID NO: 351 - RNA, 20 nt, synthetic construct
  source 1..20: mol_type = other RNA
tgtgggcatgagcacgaggt

SEQ ID NO: 352 - RNA, 20 nt, synthetic construct
  source 1..20: mol_type = other RNA
tctggtgggcaagcaatgct

SEQ ID NO: 353 - RNA, 20 nt, synthetic construct
  source 1..20: mol_type = other RNA
ggatctgcgccgtttctgtg

SEQ ID NO: 354 - RNA, 20 nt, synthetic construct
  source 1..20: mol_type = other RNA
tagtcacatgcaggacaccc

SEQ ID NO: 355 - RNA, 20 nt, synthetic construct
  source 1..20: mol_type = other RNA
aagacagcaggctctgtgcg

SEQ ID NO: 356 - RNA, 20 nt, synthetic construct
  source 1..20: mol_type = other RNA
aatcttcatcttgtgatagg

SEQ ID NO: 357 - RNA, 20 nt, synthetic construct
  source 1..20: mol_type = other RNA
agggtaataggtgaactgtt

SEQ ID NO: 358 - RNA, 20 nt, synthetic construct
  source 1..20: mol_type = other RNA
ctgcacctagccatcatcca

SEQ ID NO: 359 - RNA, 20 nt, synthetic construct
  source 1..20: mol_type = other RNA
tcgtcccccctgccgctctg

SEQ ID NO: 360 - RNA, 20 nt, synthetic construct
  source 1..20: mol_type = other RNA
cagcatggatgtcagcacct

SEQ ID NO: 361 - RNA, 20 nt, synthetic construct
  source 1..20: mol_type = other RNA
tgacatccatgctgaaaacg

SEQ ID NO: 362 - RNA, 20 nt, synthetic construct
  source 1..20: mol_type = other RNA
aagtgaggtcaagaggcgtg

SEQ ID NO: 363 - RNA, 20 nt, synthetic construct
  source 1..20: mol_type = other RNA
tctgtcggtacgtgtctacc

SEQ ID NO: 364 - RNA, 20 nt, synthetic construct
  source 1..20: mol_type = other RNA
tgaaggaagacagtgcgtac

SEQ ID NO: 365 - RNA, 20 nt, synthetic construct
  source 1..20: mol_type = other RNA
caaattgaactcctccattg

SEQ ID NO: 366 - RNA, 20 nt, synthetic construct
  source 1..20: mol_type = other RNA
cggctccgctctaggcccca

SEQ ID NO: 367 - RNA, 20 nt, synthetic construct
  source 1..20: mol_type = other RNA
gttcacctattaccctctgg

SEQ ID NO: 368 - RNA, 20 nt, synthetic construct
  source 1..20: mol_type = other RNA
cccatgggctgctacccggg

SEQ ID NO: 369 - RNA, 20 nt, synthetic construct
  source 1..20: mol_type = other RNA
ggcctgcggctcgcactggg

SEQ ID NO: 370 - RNA, 20 nt, synthetic construct
  source 1..20: mol_type = other RNA
actggtctgcccgtggatga

SEQ ID NO: 371 - RNA, 20 nt, synthetic construct
  source 1..20: mol_type = other RNA
tgcacctagccatcatccac

SEQ ID NO: 372 - RNA, 20 nt, synthetic construct
  source 1..20: mol_type = other RNA
caatgacactggtctgcccg

SEQ ID NO: 373 - RNA, 20 nt, synthetic construct
  source 1..20: mol_type = other RNA
ctgcgtgcactgcttcagag

SEQ ID NO: 374 - RNA, 20 nt, synthetic construct
  source 1..20: mol_type = other RNA
ccgagtcgctatcagaggta

SEQ ID NO: 375 - RNA, 20 nt, synthetic construct
  source 1..20: mol_type = other RNA
atagcgactcggactctgaa

SEQ ID NO: 376 - RNA, 20 nt, synthetic construct
  source 1..20: mol_type = other RNA
gtgctgcaagtgaggtcaag

SEQ ID NO: 377 - RNA, 20 nt, synthetic construct
  source 1..20: mol_type = other RNA
gtatcaccaagtgacagtcc

SEQ ID NO: 378 - RNA, 20 nt, synthetic construct
  source 1..20: mol_type = other RNA
cactgggtgaggttgtctgt

SEQ ID NO: 379 - RNA, 20 nt, synthetic construct
  source 1..20: mol_type = other RNA
ctggaggccctgtctgacat

SEQ ID NO: 380 - RNA, 20 nt, synthetic construct
  source 1..20: mol_type = other RNA
accgggcagtcctccatggg

SEQ ID NO: 381 - RNA, 20 nt, synthetic construct
  source 1..20: mol_type = other RNA
tcttgtgataggggggtgtc

SEQ ID NO: 382 - RNA, 20 nt, synthetic construct
  source 1..20: mol_type = other RNA
acagttcacctattaccctc

SEQ ID NO: 383 - RNA, 20 nt, synthetic construct
  source 1..20: mol_type = other RNA
catgccgatccagcagagct

SEQ ID NO: 384 - RNA, 20 nt, synthetic construct
  source 1..20: mol_type = other RNA
cgagtcgctatcagaggtag

SEQ ID NO: 385 - RNA, 20 nt, synthetic construct
  source 1..20: mol_type = other RNA
tgttccacgatcaccaggta

SEQ ID NO: 386 - RNA, 20 nt, synthetic construct
  source 1..20: mol_type = other RNA
ctttcggcccttctcactgg

SEQ ID NO: 387 - RNA, 20 nt, synthetic construct
  source 1..20: mol_type = other RNA
cccggtgcctccagtgagaa

SEQ ID NO: 388 - RNA, 20 nt, synthetic construct
  source 1..20: mol_type = other RNA
aaagacctatcccactgtca

SEQ ID NO: 389 - RNA, 20 nt, synthetic construct
  source 1..20: mol_type = other RNA
gggaccagccaagatcgagg

SEQ ID NO: 390 - RNA, 20 nt, synthetic construct
  source 1..20: mol_type = other RNA
attgcttgcccaccagactg

SEQ ID NO: 391 - RNA, 20 nt, synthetic construct
  source 1..20: mol_type = other RNA
atcttcaggtttgatgcccc

SEQ ID NO: 392 - RNA, 20 nt, synthetic construct
  source 1..20: mol_type = other RNA
acaagacagcaggctctgtg

SEQ ID NO: 393 - RNA, 20 nt, synthetic construct
  source 1..20: mol_type = other RNA
caactgaaacgcaagcgagg

SEQ ID NO: 394 - RNA, 20 nt, synthetic construct
  source 1..20: mol_type = other RNA
acctattaccctctggtgga

SEQ ID NO: 395 - RNA, 20 nt, synthetic construct
  source 1..20: mol_type = other RNA
cagcccctaccagtccggcg

SEQ ID NO: 396 - RNA, 20 nt, synthetic construct
  source 1..20: mol_type = other RNA
ggagggggcgcttggctccg

SEQ ID NO: 397 - RNA, 20 nt, synthetic construct
  source 1..20: mol_type = other RNA
cggtgacgccgtagtcgagt

SEQ ID NO: 398 - RNA, 20 nt, synthetic construct
  source 1..20: mol_type = other RNA
cagcagcgcgcgcgcgtccg

SEQ ID NO: 399 - RNA, 20 nt, synthetic construct
  source 1..20: mol_type = other RNA
tgcacctggcggtgatcacg

SEQ ID NO: 400 - RNA, 20 nt, synthetic construct
  source 1..20: mol_type = other RNA
aggactgtatccagtacacc

SEQ ID NO: 401 - RNA, 20 nt, synthetic construct
  source 1..20: mol_type = other RNA
tccgagtcgctatcagaggt

SEQ ID NO: 402 - RNA, 20 nt, synthetic construct
  source 1..20: mol_type = other RNA
cgggcagtcctccatgggag

SEQ ID NO: 403 - RNA, 20 nt, synthetic construct
  source 1..20: mol_type = other RNA
tgtgaaggcccctcccatgg

SEQ ID NO: 404 - RNA, 20 nt, synthetic construct
  source 1..20: mol_type = other RNA
taccaggtccacctcgatct

SEQ ID NO: 405 - RNA, 20 nt, synthetic construct
  source 1..20: mol_type = other RNA
gtgggtcactgtgtgttacc

SEQ ID NO: 406 - RNA, 20 nt, synthetic construct
  source 1..20: mol_type = other RNA
gcaagcaatgctcggagctg

SEQ ID NO: 407 - RNA, 20 nt, synthetic construct
  source 1..20: mol_type = other RNA
gccatcactggctctaagga

SEQ ID NO: 408 - RNA, 20 nt, synthetic construct
  source 1..20: mol_type = other RNA
gaatggatggcaggcctttg

SEQ ID NO: 409 - RNA, 20 nt, synthetic construct
  source 1..20: mol_type = other RNA
tgtgggagagaagtccccaa

SEQ ID NO: 410 - RNA, 20 nt, synthetic construct
  source 1..20: mol_type = other RNA
atcacaagatgaagattgag

SEQ ID NO: 411 - RNA, 20 nt, synthetic construct
  source 1..20: mol_type = other RNA
ctgcacctcttccttgtctg

SEQ ID NO: 412 - RNA, 20 nt, synthetic construct
  source 1..20: mol_type = other RNA
gaaaccgaggctgccacctg

SEQ ID NO: 413 - RNA, 20 nt, synthetic construct
  source 1..20: mol_type = other RNA
ctggtaggggctgtaggcca

SEQ ID NO: 414 - RNA, 20 nt, synthetic construct
  source 1..20: mol_type = other RNA
gcctacagcccctaccagtc

SEQ ID NO: 415 - RNA, 20 nt, synthetic construct
  source 1..20: mol_type = other RNA
acctcgctgcagcatctccg

SEQ ID NO: 416 - RNA, 20 nt, synthetic construct
  source 1..20: mol_type = other RNA
gtgagctttctgctgcgggt

SEQ ID NO: 417 - RNA, 20 nt, synthetic construct
  source 1..20: mol_type = other RNA
tgcccgcagcgccagatgca

SEQ ID NO: 418 - RNA, 20 nt, synthetic construct
  source 1..20: mol_type = other RNA
aaaggtgcgagcgttcacgt

SEQ ID NO: 419 - RNA, 20 nt, synthetic construct
  source 1..20: mol_type = other RNA
cgtgaacgctcgcacctttg

SEQ ID NO: 420 - RNA, 20 nt, synthetic construct
  source 1..20: mol_type = other RNA
caggggtgtgtttcccgcaa

SEQ ID NO: 421 - RNA, 20 nt, synthetic construct
  source 1..20: mol_type = other RNA
agagtccgagtcgctatcag

SEQ ID NO: 422 - RNA, 20 nt, synthetic construct
  source 1..20: mol_type = other RNA
cagagctggcagagcgtctg

SEQ ID NO: 423 - RNA, 20 nt, synthetic construct
  source 1..20: mol_type = other RNA
ggacctggcaggtctactgg

SEQ ID NO: 424 - RNA, 20 nt, synthetic construct
  source 1..20: mol_type = other RNA
ccgtggcagagccctcctgg

SEQ ID NO: 425 - RNA, 20 nt, synthetic construct
  source 1..20: mol_type = other RNA
ggcaccgggcagtcctccat

SEQ ID NO: 426 - RNA, 20 nt, synthetic construct
  source 1..20: mol_type = other RNA
aggcaccgggcagtcctcca

SEQ ID NO: 427 - RNA, 20 nt, synthetic construct
  source 1..20: mol_type = other RNA
tcgtgctcatgcccacagtc

SEQ ID NO: 428 - RNA, 20 nt, synthetic construct
  source 1..20: mol_type = other RNA
ggcaagcaatgctcggagct

SEQ ID NO: 429 - RNA, 20 nt, synthetic construct
  source 1..20: mol_type = other RNA
aggagccatcactggctcta

SEQ ID NO: 430 - RNA, 20 nt, synthetic construct
  source 1..20: mol_type = other RNA
actgctgtcatggatgggct

SEQ ID NO: 431 - RNA, 20 nt, synthetic construct
  source 1..20: mol_type = other RNA
tctcgaatggacaagacagc

SEQ ID NO: 432 - RNA, 20 nt, synthetic construct
  source 1..20: mol_type = other RNA
ctttgtgacaaggtgcagaa

SEQ ID NO: 433 - RNA, 20 nt, synthetic construct
  source 1..20: mol_type = other RNA
accttccaccagagggtaat

SEQ ID NO: 434 - RNA, 20 nt, synthetic construct
  source 1..20: mol_type = other RNA
catgtgggagccacccccga

SEQ ID NO: 435 - RNA, 20 nt, synthetic construct
  source 1..20: mol_type = other RNA
ggcccgcgccggactggtag

SEQ ID NO: 436 - RNA, 20 nt, synthetic construct
  source 1..20: mol_type = other RNA
gccgtagtcgagtagggctc

SEQ ID NO: 437 - RNA, 20 nt, synthetic construct
  source 1..20: mol_type = other RNA
cgccgtagtcgagtagggct

SEQ ID NO: 438 - RNA, 20 nt, synthetic construct
  source 1..20: mol_type = other RNA
tctgcccgtggatgatggct

SEQ ID NO: 439 - RNA, 20 nt, synthetic construct
  source 1..20: mol_type = other RNA
gttgacaacgccgaggtcct

SEQ ID NO: 440 - RNA, 20 nt, synthetic construct
  source 1..20: mol_type = other RNA
gccaggtgcaggggcgtctg

SEQ ID NO: 441 - RNA, 20 nt, synthetic construct
  source 1..20: mol_type = other RNA
ggatctgctggtggacagtg

SEQ ID NO: 442 - RNA, 20 nt, synthetic construct
  source 1..20: mol_type = other RNA
tgcgagcgttcacgttggcc

SEQ ID NO: 443 - RNA, 20 nt, synthetic construct
  source 1..20: mol_type = other RNA
tgacctcacttgcagcacca

SEQ ID NO: 444 - RNA, 20 nt, synthetic construct
  source 1..20: mol_type = other RNA
gggcctccagtagacctgcc

SEQ ID NO: 445 - RNA, 20 nt, synthetic construct
  source 1..20: mol_type = other RNA
ctctaggcccatgtcagaca

SEQ ID NO: 446 - RNA, 20 nt, synthetic construct
  source 1..20: mol_type = other RNA
gtctgacatgggcctagagg

SEQ ID NO: 447 - RNA, 20 nt, synthetic construct
  source 1..20: mol_type = other RNA
taggctgttccacgatcacc

SEQ ID NO: 448 - RNA, 20 nt, synthetic construct
  source 1..20: mol_type = other RNA
tggcccctacctggtgatcg

SEQ ID NO: 449 - RNA, 20 nt, synthetic construct
  source 1..20: mol_type = other RNA
agactgtgggcatgagcacg

SEQ ID NO: 450 - RNA, 20 nt, synthetic construct
  source 1..20: mol_type = other RNA
gctcatgcccacagtctggt

SEQ ID NO: 451 - RNA, 20 nt, synthetic construct
  source 1..20: mol_type = other RNA
ctatgatacaaaaacttcag

SEQ ID NO: 452 - RNA, 20 nt, synthetic construct
  source 1..20: mol_type = other RNA
gcggctccgctctaggcccc

SEQ ID NO: 453 - RNA, 20 nt, synthetic construct
  source 1..20: mol_type = other RNA
gccttccttagagccagtga

SEQ ID NO: 454 - RNA, 20 nt, synthetic construct
  source 1..20: mol_type = other RNA
acagcaggctctgtgcgggg

SEQ ID NO: 455 - RNA, 20 nt, synthetic construct
  source 1..20: mol_type = other RNA
ggatgatgagaatggatggc

SEQ ID NO: 456 - RNA, 20 nt, synthetic construct
  source 1..20: mol_type = other RNA
actgaaacgcaagcgaggag

SEQ ID NO: 457 - RNA, 20 nt, synthetic construct
  source 1..20: mol_type = other RNA
ctcccgggtagcagcccatg

SEQ ID NO: 458 - RNA, 20 nt, synthetic construct
  source 1..20: mol_type = other RNA
ggtgcccagcagggactccg

SEQ ID NO: 459 - RNA, 20 nt, synthetic construct
  source 1..20: mol_type = other RNA
tcgcactggggggtcctgga

SEQ ID NO: 460 - RNA, 20 nt, synthetic construct
  source 1..20: mol_type = other RNA
gggcctgcggctcgcactgg

SEQ ID NO: 461 - RNA, 20 nt, synthetic construct
  source 1..20: mol_type = other RNA
ggggcctgcggctcgcactg

SEQ ID NO: 462 - RNA, 20 nt, synthetic construct
  source 1..20: mol_type = other RNA
cggggcctgcggctcgcact

SEQ ID NO: 463 - RNA, 20 nt, synthetic construct
  source 1..20: mol_type = other RNA
gccccggagatgctgcagcg

SEQ ID NO: 464 - RNA, 20 nt, synthetic construct
  source 1..20: mol_type = other RNA
gagtacaacgcgcgcctgtt

SEQ ID NO: 465 - RNA, 20 nt, synthetic construct
  source 1..20: mol_type = other RNA
ccagctctgctggatcggca

SEQ ID NO: 466 - RNA, 20 nt, synthetic construct
  source 1..20: mol_type = other RNA
tcaggcatatgcaacagctg

SEQ ID NO: 467 - RNA, 20 nt, synthetic construct
  source 1..20: mol_type = other RNA
ctggatctgctggtggacag

SEQ ID NO: 468 - RNA, 20 nt, synthetic construct
  source 1..20: mol_type = other RNA
gaggccacagagcggcaggg

SEQ ID NO: 469 - RNA, 20 nt, synthetic construct
  source 1..20: mol_type = other RNA
gacacccgaagcagcttccg

SEQ ID NO: 470 - RNA, 20 nt, synthetic construct
  source 1..20: mol_type = other RNA
tctgacatgggcctagagga

SEQ ID NO: 471 - RNA, 20 nt, synthetic construct
  source 1..20: mol_type = other RNA
tgtgctgggcagcttgtctc

SEQ ID NO: 472 - RNA, 20 nt, synthetic construct
  source 1..20: mol_type = other RNA
caccccctgagccaccagga

SEQ ID NO: 473 - RNA, 20 nt, synthetic construct
  source 1..20: mol_type = other RNA
ggtctttcggcccttctcac

SEQ ID NO: 474 - RNA, 20 nt, synthetic construct
  source 1..20: mol_type = other RNA
aggtccacctcgatcttggc

SEQ ID NO: 475 - RNA, 20 nt, synthetic construct
  source 1..20: mol_type = other RNA
ttgcttgcccaccagactgt

SEQ ID NO: 476 - RNA, 20 nt, synthetic construct
  source 1..20: mol_type = other RNA
ggggatctgcgccgtttctg

SEQ ID NO: 477 - RNA, 20 nt, synthetic construct
  source 1..20: mol_type = other RNA
tgttcttcttagtcacatgc

SEQ ID NO: 478 - RNA, 20 nt, synthetic construct
  source 1..20: mol_type = other RNA
ttctatgaggatgatgagaa

SEQ ID NO: 479 - RNA, 20 nt, synthetic construct
  source 1..20: mol_type = other RNA
atgaggatgatgagaatgga

SEQ ID NO: 480 - RNA, 20 nt, synthetic construct
  source 1..20: mol_type = other RNA
acctgtttatgcacatctgt

SEQ ID NO: 481 - RNA, 20 nt, synthetic construct
  source 1..20: mol_type = other RNA
ccgaagggctgggagaaggt

SEQ ID NO: 482 - RNA, 20 nt, synthetic construct
  source 1..20: mol_type = other RNA
tccagctcctccgtagcccc

SEQ ID NO: 483 - RNA, 20 nt, synthetic construct
  source 1..20: mol_type = other RNA
ggtgcagccgggggctacgg

SEQ ID NO: 484 - RNA, 20 nt, synthetic construct
  source 1..20: mol_type = other RNA
gggaggaggggaagaaaccg

SEQ ID NO: 485 - RNA, 20 nt, synthetic construct
  source 1..20: mol_type = other RNA
gggcccgcgccggactggta

SEQ ID NO: 486 - RNA, 20 nt, synthetic construct
  source 1..20: mol_type = other RNA
ggggcccgcgccggactggt

SEQ ID NO: 487 - RNA, 20 nt, synthetic construct
  source 1..20: mol_type = other RNA
cctcccgggtagcagcccat

SEQ ID NO: 488 - RNA, 20 nt, synthetic construct
  source 1..20: mol_type = other RNA
gggccccatgggctgctacc

SEQ ID NO: 489 - RNA, 20 nt, synthetic construct
  source 1..20: mol_type = other RNA
tctcgtcctgcgccgtcagc

SEQ ID NO: 490 - RNA, 20 nt, synthetic construct
  source 1..20: mol_type = other RNA
atccaccacgcccaggacct

SEQ ID NO: 491 - RNA, 20 nt, synthetic construct
  source 1..20: mol_type = other RNA
cgtgatcaccgccaggtgca

SEQ ID NO: 492 - RNA, 20 nt, synthetic construct
  source 1..20: mol_type = other RNA
ccagacgcccctgcacctgg

SEQ ID NO: 493 - RNA, 20 nt, synthetic construct
  source 1..20: mol_type = other RNA
tctgccccgtgatcaccgcc

SEQ ID NO: 494 - RNA, 20 nt, synthetic construct
  source 1..20: mol_type = other RNA
ctgcacctggcggtgatcac

SEQ ID NO: 495 - RNA, 20 nt, synthetic construct
  source 1..20: mol_type = other RNA
atgcatctggcgctgcgggc

SEQ ID NO: 496 - RNA, 20 nt, synthetic construct
  source 1..20: mol_type = other RNA
ctgaagtggaggccacagag

SEQ ID NO: 497 - RNA, 20 nt, synthetic construct
  source 1..20: mol_type = other RNA
cgagacaagctgcccagcac

SEQ ID NO: 498 - RNA, 20 nt, synthetic construct
  source 1..20: mol_type = other RNA
ccgggcagtcctccatggga

SEQ ID NO: 499 - RNA, 20 nt, synthetic construct
  source 1..20: mol_type = other RNA
ccctcccatggaggactgcc

SEQ ID NO: 500 - RNA, 20 nt, synthetic construct
  source 1..20: mol_type = other RNA
gcccggtgcctccagtgaga

SEQ ID NO: 501 - RNA, 20 nt, synthetic construct
  source 1..20: mol_type = other RNA
ctgtgggcatgagcacgagg

SEQ ID NO: 502 - RNA, 20 nt, synthetic construct
  source 1..20: mol_type = other RNA
gtgactaagaagaacatgat

SEQ ID NO: 503 - RNA, 20 nt, synthetic construct
  source 1..20: mol_type = other RNA
taaggccctggggcctagag

SEQ ID NO: 504 - RNA, 20 nt, synthetic construct
  source 1..20: mol_type = other RNA
tgggagatgactggcttcag

SEQ ID NO: 505 - RNA, 20 nt, synthetic construct
  source 1..20: mol_type = other RNA
aaacctgaagatttctcgaa

SEQ ID NO: 506 - RNA, 20 nt, synthetic construct
  source 1..20: mol_type = other RNA
caagacagcaggctctgtgc

SEQ ID NO: 507 - RNA, 20 nt, synthetic construct
  source 1..20: mol_type = other RNA
aactgaaacgcaagcgagga

SEQ ID NO: 508 - RNA, 20 nt, synthetic construct
  source 1..20: mol_type = other RNA
cccagagcctccacccatgt

SEQ ID NO: 509 - RNA, 20 nt, synthetic construct
  source 1..20: mol_type = other RNA
gtccctgctgggcaccgtgg

SEQ ID NO: 510 - RNA, 20 nt, synthetic construct
  source 1..20: mol_type = other RNA
tggctccgcggcttcctccc

SEQ ID NO: 511 - RNA, 20 nt, synthetic construct
  source 1..20: mol_type = other RNA
cgtcctgcgccgtcagcagg

SEQ ID NO: 512 - RNA, 20 nt, synthetic construct
  source 1..20: mol_type = other RNA
gcgccacctgctgacggcgc

SEQ ID NO: 513 - RNA, 20 nt, synthetic construct
  source 1..20: mol_type = other RNA
tggtgaggttgacaacgccg

SEQ ID NO: 514 - RNA, 20 nt, synthetic construct
  source 1..20: mol_type = other RNA
cagacccagctctgctggat

SEQ ID NO: 515 - RNA, 20 nt, synthetic construct
  source 1..20: mol_type = other RNA
agccatgcatctggcgctgc

SEQ ID NO: 516 - RNA, 20 nt, synthetic construct
  source 1..20: mol_type = other RNA
ggtcacccatctggtcacca

SEQ ID NO: 517 - RNA, 20 nt, synthetic construct
  source 1..20: mol_type = other RNA
tgcacctggcagctggactg

SEQ ID NO: 518 - RNA, 20 nt, synthetic construct
  source 1..20: mol_type = other RNA
tcagcatggatgtcagcacc

SEQ ID NO: 519 - RNA, 20 nt, synthetic construct
  source 1..20: mol_type = other RNA
aaatgctgctcagaacacca

SEQ ID NO: 520 - RNA, 20 nt, synthetic construct
  source 1..20: mol_type = other RNA
gctagacgggccagaagccc

SEQ ID NO: 521 - RNA, 20 nt, synthetic construct
  source 1..20: mol_type = other RNA
cctctaggcccatgtcagac

SEQ ID NO: 522 - RNA, 20 nt, synthetic construct
  source 1..20: mol_type = other RNA
actggaggccctgtctgaca

SEQ ID NO: 523 - RNA, 20 nt, synthetic construct
  source 1..20: mol_type = other RNA
cctgtctgacatgggcctag

SEQ ID NO: 524 - RNA, 20 nt, synthetic construct
  source 1..20: mol_type = other RNA
gatcgtggaacagcctaagc

SEQ ID NO: 525 - RNA, 20 nt, synthetic construct
  source 1..20: mol_type = other RNA
agaggcttccgatttcgata

SEQ ID NO: 526 - RNA, 20 nt, synthetic construct
  source 1..20: mol_type = other RNA
cgatttcgatatggctgtga

SEQ ID NO: 527 - RNA, 20 nt, synthetic construct
  source 1..20: mol_type = other RNA
cccttctcactggaggcacc

SEQ ID NO: 528 - RNA, 20 nt, synthetic construct
  source 1..20: mol_type = other RNA
tgacagtgggataggtcttt

SEQ ID NO: 529 - RNA, 20 nt, synthetic construct
  source 1..20: mol_type = other RNA
gggcaagcaatgctcggagc

SEQ ID NO: 530 - RNA, 20 nt, synthetic construct
  source 1..20: mol_type = other RNA
gggatctgcgccgtttctgt

SEQ ID NO: 531 - RNA, 20 nt, synthetic construct
  source 1..20: mol_type = other RNA
tgtgactaagaagaacatga

SEQ ID NO: 532 - RNA, 20 nt, synthetic construct
  source 1..20: mol_type = other RNA
cagggagaaggagccatcac

SEQ ID NO: 533 - RNA, 20 nt, synthetic construct
  source 1..20: mol_type = other RNA
tcccacagatgtgcataaac

SEQ ID NO: 534 - RNA, 20 nt, synthetic construct
  source 1..20: mol_type = other RNA
cagacaaggaagaggtgcag

SEQ ID NO: 535 - RNA, 20 nt, synthetic construct
  source 1..20: mol_type = other RNA
caccttctcccagcccttcg

SEQ ID NO: 536 - RNA, 20 nt, synthetic construct
  source 1..20: mol_type = other RNA
ccacatgggtggaggctctg

SEQ ID NO: 537 - RNA, 20 nt, synthetic construct
  source 1..20: mol_type = other RNA
ccatggggcccgcgccggac

SEQ ID NO: 538 - RNA, 20 nt, synthetic construct
  source 1..20: mol_type = other RNA
agcccctaccagtccggcgc

SEQ ID NO: 539 - RNA, 20 nt, synthetic construct
  source 1..20: mol_type = other RNA
gcagcccatggggcccgcgc

SEQ ID NO: 540 - RNA, 20 nt, synthetic construct
  source 1..20: mol_type = other RNA
cggggcgcagatggccgcca

SEQ ID NO: 541 - RNA, 20 nt, synthetic construct
  source 1..20: mol_type = other RNA
ggagtccctgctgggcaccg

SEQ ID NO: 542 - RNA, 20 nt, synthetic construct
  source 1..20: mol_type = other RNA
tcctccccggagtccctgct

SEQ ID NO: 543 - RNA, 20 nt, synthetic construct
  source 1..20: mol_type = other RNA
ctcgggcgctgcgctgcgcc

SEQ ID NO: 544 - RNA, 20 nt, synthetic construct
  source 1..20: mol_type = other RNA
gacgcgcgcgcgctgctggc

SEQ ID NO: 545 - RNA, 20 nt, synthetic construct
  source 1..20: mol_type = other RNA
gtcaggcatatgcaacagct

SEQ ID NO: 546 - RNA, 20 nt, synthetic construct
  source 1..20: mol_type = other RNA
ggcttcgggctcggactgcc

SEQ ID NO: 547 - RNA, 20 nt, synthetic construct
  source 1..20: mol_type = other RNA
tggaggccacagagcggcag

SEQ ID NO: 548 - RNA, 20 nt, synthetic construct
  source 1..20: mol_type = other RNA
gtgaacgctcgcacctttgc

SEQ ID NO: 549 - RNA, 20 nt, synthetic construct
  source 1..20: mol_type = other RNA
acccgcctccttctgaaggc

SEQ ID NO: 550 - RNA, 20 nt, synthetic construct
  source 1..20: mol_type = other RNA
ggactctgaagggcctgaga

SEQ ID NO: 551 - RNA, 20 nt, synthetic construct
  source 1..20: mol_type = other RNA
tgatacagctctgcagaacc

SEQ ID NO: 552 - RNA, 20 nt, synthetic construct
  source 1..20: mol_type = other RNA
caggaggctgccactgggtg

SEQ ID NO: 553 - RNA, 20 nt, synthetic construct
  source 1..20: mol_type = other RNA
ctgcgcaggaggctgccact

SEQ ID NO: 554 - RNA, 20 nt, synthetic construct
  source 1..20: mol_type = other RNA
ccaccccctgagccaccagg

SEQ ID NO: 555 - RNA, 20 nt, synthetic construct
  source 1..20: mol_type = other RNA
caccaggagggctctgccac

SEQ ID NO: 556 - RNA, 20 nt, synthetic construct
  source 1..20: mol_type = other RNA
tgctcatgcccacagtctgg

SEQ ID NO: 557 - RNA, 20 nt, synthetic construct
  source 1..20: mol_type = other RNA
agaggcagcggctccgctct

SEQ ID NO: 558 - RNA, 20 nt, synthetic construct
  source 1..20: mol_type = other RNA
tctaggccccagggccttac

SEQ ID NO: 559 - RNA, 20 nt, synthetic construct
  source 1..20: mol_type = other RNA
gagaatggatggcaggcctt

SEQ ID NO: 560 - RNA, 20 nt, synthetic construct
  source 1..20: mol_type = other RNA
caatcttcatcttgtgatag

SEQ ID NO: 561 - RNA, 20 nt, synthetic construct
  source 1..20: mol_type = other RNA
ctcaatcttcatcttgtgat

SEQ ID NO: 562 - RNA, 20 nt, synthetic construct
  source 1..20: mol_type = other RNA
ggtggctcccacatgggtgg

SEQ ID NO: 563 - RNA, 20 nt, synthetic construct
  source 1..20: mol_type = other RNA
cagtccggcgcgggccccat

SEQ ID NO: 564 - RNA, 20 nt, synthetic construct
  source 1..20: mol_type = other RNA
gcctcccgggtagcagccca

SEQ ID NO: 565 - RNA, 20 nt, synthetic construct
  source 1..20: mol_type = other RNA
gactatctgctcaatgacac

SEQ ID NO: 566 - RNA, 20 nt, synthetic construct
  source 1..20: mol_type = other RNA
cctgcacctggcggtgatca

SEQ ID NO: 567 - RNA, 20 nt, synthetic construct
  source 1..20: mol_type = other RNA
cagccatgcatctggcgctg

SEQ ID NO: 568 - RNA, 20 nt, synthetic construct
  source 1..20: mol_type = other RNA
gctcggactgccaggtgtac

SEQ ID NO: 569 - RNA, 20 nt, synthetic construct
  source 1..20: mol_type = other RNA
gatccaggcactcagggctt

SEQ ID NO: 570 - RNA, 20 nt, synthetic construct
  source 1..20: mol_type = other RNA
cttcagaaggaggcgggtga

SEQ ID NO: 571 - RNA, 20 nt, synthetic construct
  source 1..20: mol_type = other RNA
cctcacccgcctccttctga

SEQ ID NO: 572 - RNA, 20 nt, synthetic construct
  source 1..20: mol_type = other RNA
ggggctcctcgttttcagca

SEQ ID NO: 573 - RNA, 20 nt, synthetic construct
  source 1..20: mol_type = other RNA
aggtagggggtgaaggcagt

SEQ ID NO: 574 - RNA, 20 nt, synthetic construct
  source 1..20: mol_type = other RNA
ccctacctctgatagcgact

SEQ ID NO: 575 - RNA, 20 nt, synthetic construct
  source 1..20: mol_type = other RNA
ctcctccattgtggaaccca

SEQ ID NO: 576 - RNA, 20 nt, synthetic construct
  source 1..20: mol_type = other RNA
aaggagccagccccagaaac

SEQ ID NO: 577 - RNA, 20 nt, synthetic construct
  source 1..20: mol_type = other RNA
gtccttgggccccacagaaa

SEQ ID NO: 578 - RNA, 20 nt, synthetic construct
  source 1..20: mol_type = other RNA
ctgggagatgactggcttca

SEQ ID NO: 579 - RNA, 20 nt, synthetic construct
  source 1..20: mol_type = other RNA
ggagccacccccgaagggct

SEQ ID NO: 580 - RNA, 20 nt, synthetic construct
  source 1..20: mol_type = other RNA
cttcgggggtggctcccaca

SEQ ID NO: 581 - RNA, 20 nt, synthetic construct
  source 1..20: mol_type = other RNA
gtaggggctgtaggccaggg

SEQ ID NO: 582 - RNA, 20 nt, synthetic construct
  source 1..20: mol_type = other RNA
acggtgcccagcagggactc

SEQ ID NO: 583 - RNA, 20 nt, synthetic construct
  source 1..20: mol_type = other RNA
tgcagcatctccggggcctg

SEQ ID NO: 584 - RNA, 20 nt, synthetic construct
  source 1..20: mol_type = other RNA
ccatgccgatccagcagagc

SEQ ID NO: 585 - RNA, 20 nt, synthetic construct
  source 1..20: mol_type = other RNA
tggagactcagccatgcatc

SEQ ID NO: 586 - RNA, 20 nt, synthetic construct
  source 1..20: mol_type = other RNA
agtggaggccacagagcggc

SEQ ID NO: 587 - RNA, 20 nt, synthetic construct
  source 1..20: mol_type = other RNA
gtggaggccacagagcggca

SEQ ID NO: 588 - RNA, 20 nt, synthetic construct
  source 1..20: mol_type = other RNA
catctctgtggctagatgca

SEQ ID NO: 589 - RNA, 20 nt, synthetic construct
  source 1..20: mol_type = other RNA
ggtgaaggcagtgggcacag

SEQ ID NO: 590 - RNA, 20 nt, synthetic construct
  source 1..20: mol_type = other RNA
gatagcgactcggactctga

SEQ ID NO: 591 - RNA, 20 nt, synthetic construct
  source 1..20: mol_type = other RNA
cggggtcaggggtggctcca

SEQ ID NO: 592 - RNA, 20 nt, synthetic construct
  source 1..20: mol_type = other RNA
gagggagtgaggctgctgag

SEQ ID NO: 593 - RNA, 20 nt, synthetic construct
  source 1..20: mol_type = other RNA
ctgcctcctgctccactgac

SEQ ID NO: 594 - RNA, 20 nt, synthetic construct
  source 1..20: mol_type = other RNA
gagccctcctggtggctcag

SEQ ID NO: 595 - RNA, 20 nt, synthetic construct
  source 1..20: mol_type = other RNA
gcccttctcactggaggcac

SEQ ID NO: 596 - RNA, 20 nt, synthetic construct
  source 1..20: mol_type = other RNA
cgccgtttctgtggggccca

SEQ ID NO: 597 - RNA, 20 nt, synthetic construct
  source 1..20: mol_type = other RNA
agtttatctgctttgtgaca

SEQ ID NO: 598 - RNA, 20 nt, synthetic construct
  source 1..20: mol_type = other RNA
agaatggatggcaggccttt

SEQ ID NO: 599 - RNA, 20 nt, synthetic construct
  source 1..20: mol_type = other RNA
gccggactggtaggggctgt

SEQ ID NO: 600 - RNA, 20 nt, synthetic construct
  source 1..20: mol_type = other RNA
ccggggcctgcggctcgcac

SEQ ID NO: 601 - RNA, 20 nt, synthetic construct
  source 1..20: mol_type = other RNA
ggttgacaacgccgaggtcc

SEQ ID NO: 602 - RNA, 20 nt, synthetic construct
  source 1..20: mol_type = other RNA
gtgtggtgagctttctgctg

SEQ ID NO: 603 - RNA, 20 nt, synthetic construct
  source 1..20: mol_type = other RNA
agcagtgcacgcagcagctc

SEQ ID NO: 604 - RNA, 20 nt, synthetic construct
  source 1..20: mol_type = other RNA
gttgcatatgcctgactttg

SEQ ID NO: 605 - RNA, 20 nt, synthetic construct
  source 1..20: mol_type = other RNA
ccagcagatccaggcactca

SEQ ID NO: 606 - RNA, 20 nt, synthetic construct
  source 1..20: mol_type = other RNA
ggtcaagaggcgtgtggccc

SEQ ID NO: 607 - RNA, 20 nt, synthetic construct
  source 1..20: mol_type = other RNA
ctgagcagcatttagcagca

SEQ ID NO: 608 - RNA, 20 nt, synthetic construct
  source 1..20: mol_type = other RNA
aacctggagcagctgctaga

SEQ ID NO: 609 - RNA, 20 nt, synthetic construct
  source 1..20: mol_type = other RNA
gcagagctggcagagcgtct

SEQ ID NO: 610 - RNA, 20 nt, synthetic construct
  source 1..20: mol_type = other RNA
tgggcctagaggagggagtg

SEQ ID NO: 611 - RNA, 20 nt, synthetic construct
  source 1..20: mol_type = other RNA
ctgtgctgggcagcttgtct

SEQ ID NO: 612 - RNA, 20 nt, synthetic construct
  source 1..20: mol_type = other RNA
gtcagtgcacctgaggctgg

SEQ ID NO: 613 - RNA, 20 nt, synthetic construct
  source 1..20: mol_type = other RNA
gcagcaggtcagtgcacctg

SEQ ID NO: 614 - RNA, 20 nt, synthetic construct
  source 1..20: mol_type = other RNA
cttcacagccatatcgaaat

SEQ ID NO: 615 - RNA, 20 nt, synthetic construct
  source 1..20: mol_type = other RNA
ttgctccagctcccgctgct

SEQ ID NO: 616 - RNA, 20 nt, synthetic construct
  source 1..20: mol_type = other RNA
agaggccaaagaactgaaga

SEQ ID NO: 617 - RNA, 20 nt, synthetic construct
  source 1..20: mol_type = other RNA
tggatgggctgggagatgac

SEQ ID NO: 618 - RNA, 20 nt, synthetic construct
  source 1..20: mol_type = other RNA
agttgcagaaacactgttac

SEQ ID NO: 619 - RNA, 20 nt, synthetic construct
  source 1..20: mol_type = other RNA
gctgcacctcttccttgtct

SEQ ID NO: 620 - RNA, 20 nt, synthetic construct
  source 1..20: mol_type = other RNA
aagaggtgcagcggaagcgg

SEQ ID NO: 621 - RNA, 20 nt, synthetic construct
  source 1..20: mol_type = other RNA
gggagccacccccgaagggc

SEQ ID NO: 622 - RNA, 20 nt, synthetic construct
  source 1..20: mol_type = other RNA
ccccagagcctccacccatg

SEQ ID NO: 623 - RNA, 20 nt, synthetic construct
  source 1..20: mol_type = other RNA
cacatgggtggaggctctgg

SEQ ID NO: 624 - RNA, 20 nt, synthetic construct
  source 1..20: mol_type = other RNA
ggctctgggggtgcagccgg

SEQ ID NO: 625 - RNA, 20 nt, synthetic construct
  source 1..20: mol_type = other RNA
actggtaggggctgtaggcc

SEQ ID NO: 626 - RNA, 20 nt, synthetic construct
  source 1..20: mol_type = other RNA
ggccccatgggctgctaccc

SEQ ID NO: 627 - RNA, 20 nt, synthetic construct
  source 1..20: mol_type = other RNA
gaccccccagtgcgagccgc

SEQ ID NO: 628 - RNA, 20 nt, synthetic construct
  source 1..20: mol_type = other RNA
ggacgcgcgcgcgctgctgg

SEQ ID NO: 629 - RNA, 20 nt, synthetic construct
  source 1..20: mol_type = other RNA
cgccgaggtcctgggcgtgg

SEQ ID NO: 630 - RNA, 20 nt, synthetic construct
  source 1..20: mol_type = other RNA
agtcaggcatatgcaacagc

SEQ ID NO: 631 - RNA, 20 nt, synthetic construct
  source 1..20: mol_type = other RNA
ggaggccacagagcggcagg

SEQ ID NO: 632 - RNA, 20 nt, synthetic construct
  source 1..20: mol_type = other RNA
cttgcatctagccacagaga

SEQ ID NO: 633 - RNA, 20 nt, synthetic construct
  source 1..20: mol_type = other RNA
ggtaccccagtccagctgcc

SEQ ID NO: 634 - RNA, 20 nt, synthetic construct
  source 1..20: mol_type = other RNA
gaaggaggcgggtgagggtc

SEQ ID NO: 635 - RNA, 20 nt, synthetic construct
  source 1..20: mol_type = other RNA
ccttcagaaggaggcgggtg

SEQ ID NO: 636 - RNA, 20 nt, synthetic construct
  source 1..20: mol_type = other RNA
accagccttcagaaggaggc

SEQ ID NO: 637 - RNA, 20 nt, synthetic construct
  source 1..20: mol_type = other RNA
tagcagcaaggtcttcacct

SEQ ID NO: 638 - RNA, 20 nt, synthetic construct
  source 1..20: mol_type = other RNA
acctggagcagctgctagac

SEQ ID NO: 639 - RNA, 20 nt, synthetic construct
  source 1..20: mol_type = other RNA
gccagaagcccagggcagct

SEQ ID NO: 640 - RNA, 20 nt, synthetic construct
  source 1..20: mol_type = other RNA
ctggctggcggggacctggc

SEQ ID NO: 641 - RNA, 20 nt, synthetic construct
  source 1..20: mol_type = other RNA
tgcccgtggcagagccctcc

SEQ ID NO: 642 - RNA, 20 nt, synthetic construct
  source 1..20: mol_type = other RNA
accaggtaggggccatcagc

SEQ ID NO: 643 - RNA, 20 nt, synthetic construct
  source 1..20: mol_type = other RNA
gcagcgggagctggagcaag

SEQ ID NO: 644 - RNA, 20 nt, synthetic construct
  source 1..20: mol_type = other RNA
tcaatcttcatcttgtgata

SEQ ID NO: 645 - RNA, 20 nt, synthetic construct
  source 1..20: mol_type = other RNA
ggtgcagcggaagcggagga

SEQ ID NO: 646 - RNA, 20 nt, synthetic construct
  source 1..20: mol_type = other RNA
gggggtggctcccacatggg

SEQ ID NO: 647 - RNA, 20 nt, synthetic construct
  source 1..20: mol_type = other RNA
cccacatgggtggaggctct

SEQ ID NO: 648 - RNA, 20 nt, synthetic construct
  source 1..20: mol_type = other RNA
gcccagcagggactccgggg

SEQ ID NO: 649 - RNA, 20 nt, synthetic construct
  source 1..20: mol_type = other RNA
ctcgcactggggggtcctgg

SEQ ID NO: 650 - RNA, 20 nt, synthetic construct
  source 1..20: mol_type = other RNA
caacgcgcgcctgttcggcc

SEQ ID NO: 651 - RNA, 20 nt, synthetic construct
  source 1..20: mol_type = other RNA
gggacagcgccacctgctga

SEQ ID NO: 652 - RNA, 20 nt, synthetic construct
  source 1..20: mol_type = other RNA
tgcaacagctggggcacagc

SEQ ID NO: 653 - RNA, 20 nt, synthetic construct
  source 1..20: mol_type = other RNA
ttgcatatgcctgactttga

SEQ ID NO: 654 - RNA, 20 nt, synthetic construct
  source 1..20: mol_type = other RNA
accagcagatccaggcactc

SEQ ID NO: 655 - RNA, 20 nt, synthetic construct
  source 1..20: mol_type = other RNA
aggacacccgaagcagcttc

SEQ ID NO: 656 - RNA, 20 nt, synthetic construct
  source 1..20: mol_type = other RNA
ggacacccgaagcagcttcc

SEQ ID NO: 657 - RNA, 20 nt, synthetic construct
  source 1..20: mol_type = other RNA
ttagcagcaaggtcttcacc

SEQ ID NO: 658 - RNA, 20 nt, synthetic construct
  source 1..20: mol_type = other RNA
gctgggctgggcggggtcag

SEQ ID NO: 659 - RNA, 20 nt, synthetic construct
  source 1..20: mol_type = other RNA
cggggacctggcaggtctac

SEQ ID NO: 660 - RNA, 20 nt, synthetic construct
  source 1..20: mol_type = other RNA
ggcagcttgtctcgggtttc

SEQ ID NO: 661 - RNA, 20 nt, synthetic construct
  source 1..20: mol_type = other RNA
agagccctcctggtggctca

SEQ ID NO: 662 - RNA, 20 nt, synthetic construct
  source 1..20: mol_type = other RNA
cctgaggctgggggtgcccg

SEQ ID NO: 663 - RNA, 20 nt, synthetic construct
  source 1..20: mol_type = other RNA
gatgactggcttcaggggca

SEQ ID NO: 664 - RNA, 20 nt, synthetic construct
  source 1..20: mol_type = other RNA
cggagccaagcgccccctcc

SEQ ID NO: 665 - RNA, 20 nt, synthetic construct
  source 1..20: mol_type = other RNA
cggctcgcactggggggtcc

SEQ ID NO: 666 - RNA, 20 nt, synthetic construct
  source 1..20: mol_type = other RNA
cgcggacgcgcgcgcgctgc

SEQ ID NO: 667 - RNA, 20 nt, synthetic construct
  source 1..20: mol_type = other RNA
ccgtgatcaccgccaggtgc

SEQ ID NO: 668 - RNA, 20 nt, synthetic construct
  source 1..20: mol_type = other RNA
ctggcgctgcgggcaggcgc

SEQ ID NO: 669 - RNA, 20 nt, synthetic construct
  source 1..20: mol_type = other RNA
gcatctagccacagagatgg

SEQ ID NO: 670 - RNA, 20 nt, synthetic construct
  source 1..20: mol_type = other RNA
ctgcacctggcagctggact

SEQ ID NO: 671 - RNA, 20 nt, synthetic construct
  source 1..20: mol_type = other RNA
gggtgaaggcagtgggcaca

SEQ ID NO: 672 - RNA, 20 nt, synthetic construct
  source 1..20: mol_type = other RNA
gtggccccggaagctgcttc

SEQ ID NO: 673 - RNA, 20 nt, synthetic construct
  source 1..20: mol_type = other RNA
gtttctggggctggctcctt

SEQ ID NO: 674 - RNA, 20 nt, synthetic construct
  source 1..20: mol_type = other RNA
ggctgtgaaggcccctccca

SEQ ID NO: 675 - RNA, 20 nt, synthetic construct
  source 1..20: mol_type = other RNA
ccagtccggcgcgggcccca

SEQ ID NO: 676 - RNA, 20 nt, synthetic construct
  source 1..20: mol_type = other RNA
ccagtgcgagccgcaggccc

SEQ ID NO: 677 - RNA, 20 nt, synthetic construct
  source 1..20: mol_type = other RNA
cctggtgcaggtggttggtg

SEQ ID NO: 678 - RNA, 20 nt, synthetic construct
  source 1..20: mol_type = other RNA
cgccaggtgcaggggcgtct

SEQ ID NO: 679 - RNA, 20 nt, synthetic construct
  source 1..20: mol_type = other RNA
ccgccaggtgcaggggcgtc

SEQ ID NO: 680 - RNA, 20 nt, synthetic construct
  source 1..20: mol_type = other RNA
ggacagtggggctgaagtgg

SEQ ID NO: 681 - RNA, 20 nt, Homo sapiens
  source 1..20: mol_type = other RNA
ttcgtgaagatggtgcacaa

SEQ ID NO: 682 - RNA, 20 nt, Homo sapiens
  source 1..20: mol_type = other RNA
gggtacgccgtattccaggg

SEQ ID NO: 683 - RNA, 20 nt, Homo sapiens
  source 1..20: mol_type = other RNA
aaagcataacattaccaatg

SEQ ID NO: 684 - RNA, 20 nt, Homo sapiens
  source 1..20: mol_type = other RNA
ggtgacatcatcattgacgg

SEQ ID NO: 685 - RNA, 20 nt, Homo sapiens
  source 1..20: mol_type = other RNA
caggagggaacaaagaagcg

SEQ ID NO: 686 - RNA, 20 nt, Homo sapiens
  source 1..20: mol_type = other RNA
atttcatcgagaaattggtg

SEQ ID NO: 687 - RNA, 20 nt, Homo sapiens
  source 1..20: mol_type = other RNA
gaacttgcccagtcacagca

SEQ ID NO: 688 - RNA, 20 nt, Homo sapiens
  source 1..20: mol_type = other RNA
tgcacaacgggatagagtat

SEQ ID NO: 689 - RNA, 20 nt, Homo sapiens
  source 1..20: mol_type = other RNA
ctcaagttccaagacaccga

SEQ ID NO: 690 - RNA, 20 nt, Homo sapiens
  source 1..20: mol_type = other RNA
gacgggtacgccgtattcca

SEQ ID NO: 691 - RNA, 20 nt, Homo sapiens
  source 1..20: mol_type = other RNA
ggcccatcgctcatgccagg

SEQ ID NO: 692 - RNA, 20 nt, Homo sapiens
  source 1..20: mol_type = other RNA
gcccatcgctcatgccagga

SEQ ID NO: 693 - RNA, 20 nt, Homo sapiens
  source 1..20: mol_type = other RNA
cgccgcttaccacaaagccg

SEQ ID NO: 694 - RNA, 20 nt, Homo sapiens
  source 1..20: mol_type = other RNA
gccaaagatcagggacagcg

SEQ ID NO: 695 - RNA, 20 nt, Homo sapiens
  source 1..20: mol_type = other RNA
catgaatgaccacggctttg

SEQ ID NO: 696 - RNA, 20 nt, Homo sapiens
  source 1..20: mol_type = other RNA
accaggaggatgatccgccg

SEQ ID NO: 697 - RNA, 20 nt, Homo sapiens
  source 1..20: mol_type = other RNA
ccatcaaactggaacttctg

SEQ ID NO: 698 - RNA, 20 nt, Homo sapiens
  source 1..20: mol_type = other RNA
tcggtgcttatcatctctga

SEQ ID NO: 699 - RNA, 20 nt, Homo sapiens
  source 1..20: mol_type = other RNA
aacattaccaatgagggtga

SEQ ID NO: 700 - RNA, 20 nt, Homo sapiens
  source 1..20: mol_type = other RNA
aagcataacattaccaatga

SEQ ID NO: 701 - RNA, 20 nt, Homo sapiens
  source 1..20: mol_type = other RNA
caaagatcagggacagcgcg

SEQ ID NO: 702 - RNA, 20 nt, Homo sapiens
  source 1..20: mol_type = other RNA
gtattccagggcggagatgg

SEQ ID NO: 703 - RNA, 20 nt, Homo sapiens
  source 1..20: mol_type = other RNA
ccaagctgaagaagccccgg

SEQ ID NO: 704 - RNA, 20 nt, Homo sapiens
  source 1..20: mol_type = other RNA
taggagaagctgtctttgct

SEQ ID NO: 705 - RNA, 20 nt, Homo sapiens
  source 1..20: mol_type = other RNA
aggacgagatggcccaggtg

SEQ ID NO: 706 - RNA, 20 nt, Homo sapiens
  source 1..20: mol_type = other RNA
ccatggtaccactaaccacg

SEQ ID NO: 707 - RNA, 20 nt, Homo sapiens
  source 1..20: mol_type = other RNA
ccagtgtaagcaatcctcag

SEQ ID NO: 708 - RNA, 20 nt, Homo sapiens
  source 1..20: mol_type = other RNA
acagactttctctagaggcg

SEQ ID NO: 709 - RNA, 20 nt, Homo sapiens
  source 1..20: mol_type = other RNA
tggggcagccagaatcattg

SEQ ID NO: 710 - RNA, 20 nt, Homo sapiens
  source 1..20: mol_type = other RNA
ctgtggcacagatgaccacg

SEQ ID NO: 711 - RNA, 20 nt, Homo sapiens
  source 1..20: mol_type = other RNA
cacactgaggaatagcgagt

SEQ ID NO: 712 - RNA, 20 nt, Homo sapiens
  source 1..20: mol_type = other RNA
cacaggaagtggggtcacca

SEQ ID NO: 713 - RNA, 20 nt, Homo sapiens
  source 1..20: mol_type = other RNA
caccttctcacagtacacag

SEQ ID NO: 714 - RNA, 20 nt, Homo sapiens
  source 1..20: mol_type = other RNA
cttctcacagtacacagtgg

SEQ ID NO: 715 - RNA, 20 nt, Homo sapiens
  source 1..20: mol_type = other RNA
ctactgcttgaaaaacgagt

SEQ ID NO: 716 - RNA, 20 nt, Homo sapiens
  source 1..20: mol_type = other RNA
ccactcgctattcctcagtg

SEQ ID NO: 717 - RNA, 20 nt, Homo sapiens
  source 1..20: mol_type = other RNA
gcctaaaatcacaggaagtg

SEQ ID NO: 718 - RNA, 20 nt, Homo sapiens
  source 1..20: mol_type = other RNA
tacagcccataatagcagat

SEQ ID NO: 719 - RNA, 20 nt, Homo sapiens
  source 1..20: mol_type = other RNA
ccacactgaggaatagcgag

SEQ ID NO: 720 - RNA, 20 nt, Homo sapiens
  source 1..20: mol_type = other RNA
cccctgaggattgcttacac

SEQ ID NO: 721 - RNA, 20 nt, Homo sapiens
  source 1..20: mol_type = other RNA
ccacgtggttagtggtacca

SEQ ID NO: 722 - RNA, 20 nt, Homo sapiens
  source 1..20: mol_type = other RNA
caccactgtgtactgtgaga

SEQ ID NO: 723 - RNA, 20 nt, Homo sapiens
  source 1..20: mol_type = other RNA
tatgggctgtaaagcagctg

SEQ ID NO: 724 - RNA, 20 nt, Homo sapiens
  source 1..20: mol_type = other RNA
atgagacagactttctctag

SEQ ID NO: 725 - RNA, 20 nt, Homo sapiens
  source 1..20: mol_type = other RNA
ccagcaggttcacctgcagg

SEQ ID NO: 726 - RNA, 20 nt, Homo sapiens
  source 1..20: mol_type = other RNA
gtctgcagtcaatgttgcca

SEQ ID NO: 727 - RNA, 20 nt, Homo sapiens
  source 1..20: mol_type = other RNA
gtgagaaggtgctgatgcca

SEQ ID NO: 728 - RNA, 20 nt, Homo sapiens
  source 1..20: mol_type = other RNA
cgaacttcatgggccttagg

SEQ ID NO: 729 - RNA, 20 nt, Homo sapiens
  source 1..20: mol_type = other RNA
tccaacactctccacgatgc

SEQ ID NO: 730 - RNA, 20 nt, Homo sapiens
  source 1..20: mol_type = other RNA
ttgagggttgatgcattcag

SEQ ID NO: 731 - RNA, 20 nt, Homo sapiens
  source 1..20: mol_type = other RNA
tggagcagccagaatcattg

SEQ ID NO: 732 - RNA, 20 nt, Homo sapiens
  source 1..20: mol_type = other RNA
ccaggttgccactaaccacg

SEQ ID NO: 733 - RNA, 20 nt, Homo sapiens
  source 1..20: mol_type = other RNA
caccttctcccagtacacgg

SEQ ID NO: 734 - RNA, 20 nt, Homo sapiens
  source 1..20: mol_type = other RNA
tcgagaatccacagccaatg

SEQ ID NO: 735 - RNA, 20 nt, Homo sapiens
  source 1..20: mol_type = other RNA
ctgtcacacagatgaccacg

SEQ ID NO: 736 - RNA, 20 nt, Homo sapiens
  source 1..20: mol_type = other RNA
tacagcccataacagcagat

SEQ ID NO: 737 - RNA, 20 nt, Homo sapiens
  source 1..20: mol_type = other RNA
gtctgcagttaacgttgcca

SEQ ID NO: 738 - RNA, 20 nt, Homo sapiens
  source 1..20: mol_type = other RNA
cgaacttcataagccttagg

SEQ ID NO: 739 - RNA, 20 nt, Homo sapiens
  source 1..20: mol_type = other RNA
cagcaccttctcccagtaca

SEQ ID NO: 740 - RNA, 20 nt, Homo sapiens
  source 1..20: mol_type = other RNA
caccaccgtgtactgggaga

SEQ ID NO: 741 - RNA, 20 nt, Homo sapiens
  source 1..20: mol_type = other RNA
ccacgtggttagtggcaacc

SEQ ID NO: 742 - RNA, 20 nt, Homo sapiens
  source 1..20: mol_type = other RNA
ccgctctttactcctcagtg

SEQ ID NO: 743 - RNA, 20 nt, Homo sapiens
  source 1..20: mol_type = other RNA
ccaggaggttcacctgcagg

SEQ ID NO: 744 - RNA, 20 nt, Homo sapiens
  source 1..20: mol_type = other RNA
ctactgcttgaaaaatgagt

SEQ ID NO: 745 - RNA, 20 nt, Homo sapiens
  source 1..20: mol_type = other RNA
ccagtctaggcaatcctcgg

SEQ ID NO: 746 - RNA, 20 nt, Homo sapiens
  source 1..20: mol_type = other RNA
ccacactgaggagtaaagag

SEQ ID NO: 747 - RNA, 20 nt, Homo sapiens
  source 1..20: mol_type = other RNA
aatgaggcagactttctcca

SEQ ID NO: 748 - RNA, 20 nt, Homo sapiens
  source 1..20: mol_type = other RNA
atgaggcagactttctccag

SEQ ID NO: 749 - RNA, 20 nt, Homo sapiens
  source 1..20: mol_type = other RNA
catggcctaaaatcacagga

SEQ ID NO: 750 - RNA, 20 nt, Homo sapiens
  source 1..20: mol_type = other RNA
gcctaaaatcacaggaaggg

SEQ ID NO: 751 - RNA, 20 nt, Homo sapiens
  source 1..20: mol_type = other RNA
cccagtctaggcaatcctcg

SEQ ID NO: 752 - RNA, 20 nt, Homo sapiens
  source 1..20: mol_type = other RNA
ggtgccaaggaagtggtgaa

SEQ ID NO: 753 - RNA, 20 nt, Homo sapiens
  source 1..20: mol_type = other RNA
tccaacactctccacgatgc

SEQ ID NO: 754 - RNA, 20 nt, Homo sapiens
  source 1..20: mol_type = other RNA
acacagcacaggtagagcct

SEQ ID NO: 755 - RNA, 20 nt, Homo sapiens
  source 1..20: mol_type = other RNA
ttgagggttgatgcattcag

SEQ ID NO: 756 - RNA, 20 nt, Homo sapiens
  source 1..20: mol_type = other RNA
acacagcacaggtagaccct

SEQ ID NO: 757 - RNA, 20 nt, Homo sapiens
  source 1..20: mol_type = other RNA
tgaaaacataggtcacccca

SEQ ID NO: 758 - RNA, 20 nt, Homo sapiens
  source 1..20: mol_type = other RNA
tacagcccataacaacagat

SEQ ID NO: 759 - RNA, 20 nt, Homo sapiens
  source 1..20: mol_type = other RNA
caccttctcccagtacacag

SEQ ID NO: 760 - RNA, 20 nt, Homo sapiens
  source 1..20: mol_type = other RNA
cttctcccagtacacagtgg

SEQ ID NO: 761 - RNA, 20 nt, Homo sapiens
  source 1..20: mol_type = other RNA
tgctgacgccgacgaagtgg

SEQ ID NO: 762 - RNA, 20 nt, Homo sapiens
  source 1..20: mol_type = other RNA
cattgctgtggacatcaaca

SEQ ID NO: 763 - RNA, 20 nt, Homo sapiens
  source 1..20: mol_type = other RNA
aacacagcacaggtagaccc

SEQ ID NO: 764 - RNA, 20 nt, Homo sapiens
  source 1..20: mol_type = other RNA
cacagcacaggtagaccctg

SEQ ID NO: 765 - RNA, 20 nt, Homo sapiens
  source 1..20: mol_type = other RNA
aagcccatccaccacttcgt

SEQ ID NO: 766 - RNA, 20 nt, Homo sapiens
  source 1..20: mol_type = other RNA
aggtgctgacgccgacgaag

SEQ ID NO: 767 - RNA, 20 nt, Homo sapiens
  source 1..20: mol_type = other RNA
gcatgtggttagtggcaacc

SEQ ID NO: 768 - RNA, 20 nt, Homo sapiens
  source 1..20: mol_type = other RNA
agcagccagaatcattgctg

SEQ ID NO: 769 - RNA, 20 nt, Homo sapiens
  source 1..20: mol_type = other RNA
tcgaaaatccacagccaatg

SEQ ID NO: 770 - RNA, 20 nt, Homo sapiens
  source 1..20: mol_type = other RNA
caccactgtgtactgggaga

SEQ ID NO: 771 - RNA, 20 nt, Homo sapiens
  source 1..20: mol_type = other RNA
ccgctctttactcctcagtg

SEQ ID NO: 772 - RNA, 20 nt, Homo sapiens
  source 1..20: mol_type = other RNA
ctgtcgttcagatgagcatg

SEQ ID NO: 773 - RNA, 20 nt, Homo sapiens
  source 1..20: mol_type = other RNA
gtctgcagtcaaagttgcca

SEQ ID NO: 774 - RNA, 20 nt, Homo sapiens
  source 1..20: mol_type = other RNA
ctgaaaacataggtcacccc

SEQ ID NO: 775 - RNA, 20 nt, Homo sapiens
  source 1..20: mol_type = other RNA
ccagtctaggcaatcctcgg

SEQ ID NO: 776 - RNA, 20 nt, Homo sapiens
  source 1..20: mol_type = other RNA
gccggcatcgtggaaagtgt

SEQ ID NO: 777 - RNA, 20 nt, Homo sapiens
  source 1..20: mol_type = other RNA
acgccgacgaagtggtggat

SEQ ID NO: 778 - RNA, 20 nt, Homo sapiens
  source 1..20: mol_type = other RNA
ccacactgaggagtaaagag

SEQ ID NO: 779 - RNA, 20 nt, Homo sapiens
  source 1..20: mol_type = other RNA
aatgaggcagactttctcca

SEQ ID NO: 780 - RNA, 20 nt, Homo sapiens
  source 1..20: mol_type = other RNA
ggtagaggttgcacctccta

SEQ ID NO: 781 - RNA, 20 nt, Homo sapiens
  source 1..20: mol_type = other RNA
aaatttagaatcgataacag

SEQ ID NO: 782 - RNA, 20 nt, Homo sapiens
  source 1..20: mol_type = other RNA
agacagcacaagtcgaacca

SEQ ID NO: 783 - RNA, 20 nt, Homo sapiens
  source 1..20: mol_type = other RNA
gacagcacaagtcgaaccag

SEQ ID NO: 784 - RNA, 20 nt, Homo sapiens
  source 1..20: mol_type = other RNA
gtccactcacaaatttgtgt

SEQ ID NO: 785 - RNA, 20 nt, Homo sapiens
  source 1..20: mol_type = other RNA
tacattctctcagtacactg

SEQ ID NO: 786 - RNA, 20 nt, Homo sapiens
  source 1..20: mol_type = other RNA
ttcccacacaaatttgtgag

SEQ ID NO: 787 - RNA, 20 nt, Homo sapiens
  source 1..20: mol_type = other RNA
agtgtactgagagaatgtac

SEQ ID NO: 788 - RNA, 20 nt, Homo sapiens
  source 1..20: mol_type = other RNA
tcaacctcttcaatgcaaag

SEQ ID NO: 789 - RNA, 20 nt, Homo sapiens
  source 1..20: mol_type = other RNA
agtccactcacaaatttgtg

SEQ ID NO: 790 - RNA, 20 nt, Homo sapiens
  source 1..20: mol_type = other RNA
ggctgcaatcaacaatgcca

SEQ ID NO: 791 - RNA, 20 nt, Homo sapiens
  source 1..20: mol_type = other RNA
aagacagcacaagtcgaacc

SEQ ID NO: 792 - RNA, 20 nt, Homo sapiens
  source 1..20: mol_type = other RNA
ggttgaagtagctcccccca

SEQ ID NO: 793 - RNA, 20 nt, Homo sapiens
  source 1..20: mol_type = other RNA
taaaatacctggtttgacgt

SEQ ID NO: 794 - RNA, 20 nt, Homo sapiens
  source 1..20: mol_type = other RNA
cctcatggccaacgatcact

SEQ ID NO: 795 - RNA, 20 nt, Homo sapiens
  source 1..20: mol_type = other RNA
ggcatcagtatggcacagag

SEQ ID NO: 796 - RNA, 20 nt, Homo sapiens
  source 1..20: mol_type = other RNA
cccagtgatcgttggccatg

SEQ ID NO: 797 - RNA, 20 nt, Homo sapiens
  source 1..20: mol_type = other RNA
tttgtgaaggctaaagccct

SEQ ID NO: 798 - RNA, 20 nt, Homo sapiens
  source 1..20: mol_type = other RNA
caggtattgtggaaagtatt

SEQ ID NO: 799 - RNA, 20 nt, Homo sapiens
  source 1..20: mol_type = other RNA
attagttgttgatcactagc

SEQ ID NO: 800 - RNA, 20 nt, Homo sapiens
  source 1..20: mol_type = other RNA
ggtttgacgttggtcactcc

SEQ ID NO: 801 - RNA, 20 nt, Homo sapiens
  source 1..20: mol_type = other RNA
taatggaagacaaaaccagc

SEQ ID NO: 802 - RNA, 20 nt, Homo sapiens
  source 1..20: mol_type = other RNA
ggagtgaccaacgtcaaacc

SEQ ID NO: 803 - RNA, 20 nt, Homo sapiens
  source 1..20: mol_type = other RNA
gcgaacttcatgagccttgg

SEQ ID NO: 804 - RNA, 20 nt, Homo sapiens
  source 1..20: mol_type = other RNA
caacagtgagaagtttgtga

SEQ ID NO: 805 - RNA, 20 nt, Homo sapiens
  source 1..20: mol_type = other RNA
ttagagagagtttgtctgct

SEQ ID NO: 806 - RNA, 20 nt, Homo sapiens
  source 1..20: mol_type = other RNA
tcagggtataggcatcggtg

SEQ ID NO: 807 - RNA, 20 nt, Homo sapiens
  source 1..20: mol_type = other RNA
tgcttcccggatcattggtg

SEQ ID NO: 808 - RNA, 20 nt, Homo sapiens
  source 1..20: mol_type = other RNA
ctgatagatcattgccactg

SEQ ID NO: 809 - RNA, 20 nt, Homo sapiens
  source 1..20: mol_type = other RNA
accgatgcctataccctgag

SEQ ID NO: 810 - RNA, 20 nt, Homo sapiens
  source 1..20: mol_type = other RNA
gctggaattgtggaaagtgt

SEQ ID NO: 811 - RNA, 20 nt, Homo sapiens
  source 1..20: mol_type = other RNA
tgggtttactaaaatcctga

SEQ ID NO: 812 - RNA, 20 nt, Homo sapiens
  source 1..20: mol_type = other RNA
ctgagtggagctgatcctga

SEQ ID NO: 813 - RNA, 20 nt, Homo sapiens
  source 1..20: mol_type = other RNA
aacagagccaggctccaact

SEQ ID NO: 814 - RNA, 20 nt, Homo sapiens
  source 1..20: mol_type = other RNA
cctgagtggagctgatcctg

SEQ ID NO: 815 - RNA, 20 nt, Homo sapiens
  source 1..20: mol_type = other RNA
agtgggatgacagtgtcacc

SEQ ID NO: 816 - RNA, 20 nt, Homo sapiens
  source 1..20: mol_type = other RNA
tgtgccgtctttggtctggg

SEQ ID NO: 817 - RNA, 20 nt, Homo sapiens
  source 1..20: mol_type = other RNA
attgtggaaagtgttggtga

SEQ ID NO: 818 - RNA, 20 nt, Homo sapiens
  source 1..20: mol_type = other RNA
tactaagctgaaggcgggta

SEQ ID NO: 819 - RNA, 20 nt, Homo sapiens
  source 1..20: mol_type = other RNA
tgctgctgtgaacactgcca

SEQ ID NO: 820 - RNA, 20 nt, Homo sapiens
  source 1..20: mol_type = other RNA
gggagttactaagctgaagg

SEQ ID NO: 821 - RNA, 20 nt, Homo sapiens
  source 1..20: mol_type = other RNA
gtcggattggcagttatcat

SEQ ID NO: 822 - RNA, 20 nt, Homo sapiens
  source 1..20: mol_type = other RNA
ggctcatgaagttcgaatca

SEQ ID NO: 823 - RNA, 20 nt, Homo sapiens
  source 1..20: mol_type = other RNA
caataaagataaatttgcaa

SEQ ID NO: 824 - RNA, 20 nt, Homo sapiens
  source 1..20: mol_type = other RNA
tggtctgggaggagtcggat

SEQ ID NO: 825 - RNA, 20 nt, Homo sapiens
  source 1..20: mol_type = other RNA
agttatcatgggctgtaaag

SEQ ID NO: 826 - RNA, 20 nt, Homo sapiens
  source 1..20: mol_type = other RNA
atcggtgtggcaaaccgcag

SEQ ID NO: 827 - RNA, 20 nt, Homo sapiens
  source 1..20: mol_type = other RNA
atcatgggctgtaaagtggc

SEQ ID NO: 828 - RNA, 20 nt, Homo sapiens
  source 1..20: mol_type = other RNA
tggaaagcctctctccatag

SEQ ID NO: 829 - RNA, 20 nt, Homo sapiens
  source 1..20: mol_type = other RNA
agaaggcagactttatccaa

SEQ ID NO: 830 - RNA, 20 nt, Homo sapiens
  source 1..20: mol_type = other RNA
ctaaccttatcttctggcaa

SEQ ID NO: 831 - RNA, 20 nt, Homo sapiens
  source 1..20: mol_type = other RNA
taagcacagtgaaaccaggt

SEQ ID NO: 832 - RNA, 20 nt, Homo sapiens
  source 1..20: mol_type = other RNA
tgctgcaatcaatactgcca

SEQ ID NO: 833 - RNA, 20 nt, Homo sapiens
  source 1..20: mol_type = other RNA
aaagtatgcctaattagctg

SEQ ID NO: 834 - RNA, 20 nt, Homo sapiens
  source 1..20: mol_type = other RNA
tacctcttgcctgaattctg

SEQ ID NO: 835 - RNA, 20 nt, Homo sapiens
  source 1..20: mol_type = other RNA
gaggtacattctccacactg

SEQ ID NO: 836 - RNA, 20 nt, Homo sapiens
  source 1..20: mol_type = other RNA
aaaacccaactgatgtctga

SEQ ID NO: 837 - RNA, 20 nt, Homo sapiens
  source 1..20: mol_type = other RNA
gattgcagcaccaaacccag

SEQ ID NO: 838 - RNA, 20 nt, Homo sapiens
  source 1..20: mol_type = other RNA
ccttcatggcccaagatggt

SEQ ID NO: 839 - RNA, 20 nt, Homo sapiens
  source 1..20: mol_type = other RNA
tggtacagagatgaaagtgt

SEQ ID NO: 840 - RNA, 20 nt, Homo sapiens
  source 1..20: mol_type = other RNA
gctggaatcgttgagagtat

SEQ ID NO: 841 - RNA, 20 nt, Homo sapiens
  source 1..20: mol_type = other RNA
ggtaccatcagacatcagtt

SEQ ID NO: 842 - RNA, 20 nt, Homo sapiens
  source 1..20: mol_type = other RNA
ccaagatggtgggatacaag

SEQ ID NO: 843 - RNA, 20 nt, Homo sapiens
  source 1..20: mol_type = other RNA
catctctgtaccacacagtc

SEQ ID NO: 844 - RNA, 20 nt, Homo sapiens
  source 1..20: mol_type = other RNA
gtacagagatgaaagtgttg

SEQ ID NO: 845 - RNA, 20 nt, Homo sapiens
  source 1..20: mol_type = other RNA
ctctgtaccacacagtccgg

SEQ ID NO: 846 - RNA, 20 nt, Homo sapiens
  source 1..20: mol_type = other RNA
aggagcgactgcatcaatct

SEQ ID NO: 847 - RNA, 20 nt, Homo sapiens
  source 1..20: mol_type = other RNA
ggaaaatcaatatatcactt

SEQ ID NO: 848 - RNA, 20 nt, Homo sapiens
  source 1..20: mol_type = other RNA
tggtaccatcagacatcagt

SEQ ID NO: 849 - RNA, 20 nt, Homo sapiens
  source 1..20: mol_type = other RNA
agcagccaggatcattggag

SEQ ID NO: 850 - RNA, 20 nt, Homo sapiens
  source 1..20: mol_type = other RNA
ggtagaagtggccccaccaa

SEQ ID NO: 851 - RNA, 20 nt, Homo sapiens
  source 1..20: mol_type = other RNA
tccatacaggttgtggccac

SEQ ID NO: 852 - RNA, 20 nt, Homo sapiens
  source 1..20: mol_type = other RNA
ccaccatcttgggccatgaa

SEQ ID NO: 853 - RNA, 20 nt, Homo sapiens
  source 1..20: mol_type = other RNA
gttgtggccaccggactgtg

SEQ ID NO: 854 - RNA, 20 nt, Homo sapiens
  source 1..20: mol_type = other RNA
tactgagtgcctcaaccctc

SEQ ID NO: 855 - RNA, 20 nt, Homo sapiens
  source 1..20: mol_type = other RNA
tctacctcttcaatagaaaa

SEQ ID NO: 856 - RNA, 20 nt, Homo sapiens
  source 1..20: mol_type = other RNA
tacatttaccgagtacacag

SEQ ID NO: 857 - RNA, 20 nt, Homo sapiens
  source 1..20: mol_type = other RNA
cctactcgctcctaatgcaa

SEQ ID NO: 858 - RNA, 20 nt, Homo sapiens
  source 1..20: mol_type = other RNA
cttgggactgatacactcag

SEQ ID NO: 859 - RNA, 20 nt, Homo sapiens
  source 1..20: mol_type = other RNA
caggccaaagacgacgcaag

SEQ ID NO: 860 - RNA, 20 nt, Homo sapiens
  source 1..20: mol_type = other RNA
aagacgacgcaagtggaacc

SEQ ID NO: 861 - RNA, 20 nt, Homo sapiens
  source 1..20: mol_type = other RNA
cctttgcattaggagcgagt

SEQ ID NO: 862 - RNA, 20 nt, Homo sapiens
  source 1..20: mol_type = other RNA
gcattgcattctctacattg

SEQ ID NO: 863 - RNA, 20 nt, Homo sapiens
  source 1..20: mol_type = other RNA
cactgagtgtatcagtccca

SEQ ID NO: 864 - RNA, 20 nt, Homo sapiens
  source 1..20: mol_type = other RNA
tgtgtactcggtaaatgtac

SEQ ID NO: 865 - RNA, 20 nt, Homo sapiens
  source 1..20: mol_type = other RNA
gtggaaccaggtttgacctg

SEQ ID NO: 866 - RNA, 20 nt, Homo sapiens
  source 1..20: mol_type = other RNA
tcctctccacaggtcaaacc

SEQ ID NO: 867 - RNA, 20 nt, Homo sapiens
  source 1..20: mol_type = other RNA
actgggattgtagagagcat

SEQ ID NO: 868 - RNA, 20 nt, Homo sapiens
  source 1..20: mol_type = other RNA
atttaccgagtacacagtgg

SEQ ID NO: 869 - RNA, 20 nt, Homo sapiens
  source 1..20: mol_type = other RNA
aacagcagcgccatatccag

SEQ ID NO: 870 - RNA, 20 nt, Homo sapiens
  source 1..20: mol_type = other RNA
caccaccagatttacatgca

SEQ ID NO: 871 - RNA, 20 nt, Homo sapiens
  source 1..20: mol_type = other RNA
ccatgtgataaaaggaacaa

SEQ ID NO: 872 - RNA, 20 nt, Homo sapiens
  source 1..20: mol_type = other RNA
gaagcaacccttctccattg

SEQ ID NO: 873 - RNA, 20 nt, Homo sapiens
  source 1..20: mol_type = other RNA
ggagtgactacagtgaaacc

SEQ ID NO: 874 - RNA, 20 nt, Homo sapiens
  source 1..20: mol_type = other RNA
gttggcctgtcagtcatcat

SEQ ID NO: 875 - RNA, 20 nt, Homo sapiens
  source 1..20: mol_type = other RNA
agacaaatttgagaaggcca

SEQ ID NO: 876 - RNA, 20 nt, Homo sapiens
  source 1..20: mol_type = other RNA
tacagcccatgatgactgac

SEQ ID NO: 877 - RNA, 20 nt, Homo sapiens
  source 1..20: mol_type = other RNA
ctcagtggcacctacagcca

SEQ ID NO: 878 - RNA, 20 nt, Homo sapiens
  source 1..20: mol_type = other RNA
cagatggcaacctttgcatt

SEQ ID NO: 879 - RNA, 20 nt, Homo sapiens
  source 1..20: mol_type = other RNA
aaagtctgtttaattggctg

SEQ ID NO: 880 - RNA, 20 nt, Homo sapiens
  source 1..20: mol_type = other RNA
gctggtgcatctaggatcat

SEQ ID NO: 881 - RNA, 20 nt, Homo sapiens
  source 1..20: mol_type = other RNA
tgaagaagtctccgtcaatg

SEQ ID NO: 882 - RNA, 20 nt, Homo sapiens
  source 1..20: mol_type = other RNA
ccctgtgtgatgcgtccatg

SEQ ID NO: 883 - RNA, 20 nt, Homo sapiens
  source 1..20: mol_type = other RNA
acacacgccatgaacctgtg

SEQ ID NO: 884 - RNA, 20 nt, Homo sapiens
  source 1..20: mol_type = other RNA
cgcatggacgcatcacacag

SEQ ID NO: 885 - RNA, 20 nt, Homo sapiens
  source 1..20: mol_type = other RNA
gcctggccgatctgatcgag

SEQ ID NO: 886 - RNA, 20 nt, Homo sapiens
  source 1..20: mol_type = other RNA
tccagctggaaactcactat

SEQ ID NO: 887 - RNA, 20 nt, Homo sapiens
  source 1..20: mol_type = other RNA
ttccacggcccaatccactg

SEQ ID NO: 888 - RNA, 20 nt, Homo sapiens
  source 1..20: mol_type = other RNA
cacacgccatgaacctgtgg

SEQ ID NO: 889 - RNA, 20 nt, Homo sapiens
  source 1..20: mol_type = other RNA
gctgggctgataagtaccac

SEQ ID NO: 890 - RNA, 20 nt, Homo sapiens
  source 1..20: mol_type = other RNA
acaatgttgaccacaccagg

SEQ ID NO: 891 - RNA, 20 nt, Homo sapiens
  source 1..20: mol_type = other RNA
ggaccatgtccaaatccacc

SEQ ID NO: 892 - RNA, 20 nt, Homo sapiens
  source 1..20: mol_type = other RNA
ggccgccattgcctcccatg

SEQ ID NO: 893 - RNA, 20 nt, Homo sapiens
  source 1..20: mol_type = other RNA
agccttggcaactggaaacg

SEQ ID NO: 894 - RNA, 20 nt, Homo sapiens
  source 1..20: mol_type = other RNA
tggattacgcggccaatctg

SEQ ID NO: 895 - RNA, 20 nt, Homo sapiens
  source 1..20: mol_type = other RNA
ccgcatggacgcatcacaca

SEQ ID NO: 896 - RNA, 20 nt, Homo sapiens
  source 1..20: mol_type = other RNA
cacaatgttgaccacaccag

SEQ ID NO: 897 - RNA, 20 nt, Homo sapiens
  source 1..20: mol_type = other RNA
ctacacacgccatgaacctg

SEQ ID NO: 898 - RNA, 20 nt, Homo sapiens
  source 1..20: mol_type = other RNA
ttccatgcttgcatcaggag

SEQ ID NO: 899 - RNA, 20 nt, Homo sapiens
  source 1..20: mol_type = other RNA
cagtggacggattgacggtg

SEQ ID NO: 900 - RNA, 20 nt, Homo sapiens
  source 1..20: mol_type = other RNA
ggctgggctgataagtacca

SEQ ID NO: 901 - RNA, 20 nt, Homo sapiens
  source 1..20: mol_type = other RNA
gccgcatggacgcatcacac

SEQ ID NO: 902 - RNA, 20 nt, Homo sapiens
  source 1..20: mol_type = other RNA
tggacgcatcacacaggggc

SEQ ID NO: 903 - RNA, 20 nt, Homo sapiens
  source 1..20: mol_type = other RNA
gcacaatgttgaccacacca

SEQ ID NO: 904 - RNA, 20 nt, Homo sapiens
  source 1..20: mol_type = other RNA
atagatgtcctcctgcacga

SEQ ID NO: 905 - RNA, 20 nt, Homo sapiens
  source 1..20: mol_type = other RNA
gacctcgggctgctggttgg

SEQ ID NO: 906 - RNA, 20 nt, Homo sapiens
  source 1..20: mol_type = other RNA
gtagccataaggtccgctct

SEQ ID NO: 907 - RNA, 20 nt, Homo sapiens
  source 1..20: mol_type = other RNA
gctctcggacgggaggaacg

SEQ ID NO: 908 - RNA, 20 nt, Homo sapiens
  source 1..20: mol_type = other RNA
ggcggcgcagccggtcaacg

SEQ ID NO: 909 - RNA, 20 nt, Homo sapiens
  source 1..20: mol_type = other RNA
ctgaggtttgcgtagaccgg

SEQ ID NO: 910 - RNA, 20 nt, Homo sapiens
  source 1..20: mol_type = other RNA
aaggtccgctctcggacggg

SEQ ID NO: 911 - RNA, 20 nt, Homo sapiens
  source 1..20: mol_type = other RNA
tgaacctggccgacccagtg

SEQ ID NO: 912 - RNA, 20 nt, Homo sapiens
  source 1..20: mol_type = other RNA
ccataaggtccgctctcgga

SEQ ID NO: 913 - RNA, 20 nt, Homo sapiens
  source 1..20: mol_type = other RNA
cataaggtccgctctcggac

SEQ ID NO: 914 - RNA, 20 nt, Homo sapiens
  source 1..20: mol_type = other RNA
cctcctcacctcgcccgacg

SEQ ID NO: 915 - RNA, 20 nt, Homo sapiens
  source 1..20: mol_type = other RNA
cacgctgcccagcgtcacgt

SEQ ID NO: 916 - RNA, 20 nt, Homo sapiens
  source 1..20: mol_type = other RNA
ctgaacctggccgacccagt

SEQ ID NO: 917 - RNA, 20 nt, Homo sapiens
  source 1..20: mol_type = other RNA
cctgccaccgaggctaccgc

SEQ ID NO: 918 - RNA, 20 nt, Homo sapiens
  source 1..20: mol_type = other RNA
tcctcacctcgcccgacgtg

SEQ ID NO: 919 - RNA, 20 nt, Homo sapiens
  source 1..20: mol_type = other RNA
gccccacgtcgggcgaggtg

SEQ ID NO: 920 - RNA, 20 nt, Homo sapiens
  source 1..20: mol_type = other RNA
ttggggttactgtagccata

SEQ ID NO: 921 - RNA, 20 nt, Homo sapiens
  source 1..20: mol_type = other RNA
aacctcagcaacttcaaccc

SEQ ID NO: 922 - RNA, 20 nt, Homo sapiens
  source 1..20: mol_type = other RNA
ggctcccgcggtagcctcgg

SEQ ID NO: 923 - RNA, 20 nt, Homo sapiens
  source 1..20: mol_type = other RNA
ctgataatccagtccagcaa

SEQ ID NO: 924 - RNA, 20 nt, Homo sapiens
  source 1..20: mol_type = other RNA
accatgcctgccccgttgac

SEQ ID NO: 925 - RNA, 20 nt, Homo sapiens
  source 1..20: mol_type = other RNA
tgataatccagtccagcaac

SEQ ID NO: 926 - RNA, 20 nt, Homo sapiens
  source 1..20: mol_type = other RNA
ccacgtcgggcgaggtgagg

SEQ ID NO: 927 - RNA, 20 nt, Homo sapiens
  source 1..20: mol_type = other RNA
ggtccgagttcttggcgcgg

SEQ ID NO: 928 - RNA, 20 nt, Homo sapiens
  source 1..20: mol_type = other RNA
ggggttgcgcgggaaaggcc

SEQ ID NO: 929 - RNA, 20 nt, Homo sapiens
  source 1..20: mol_type = other RNA
caagaacgtgacagatgagc

SEQ ID NO: 930 - RNA, 20 nt, Homo sapiens
  source 1..20: mol_type = other RNA
tgctgcacgggcatctgctg

SEQ ID NO: 931 - RNA, 20 nt, Homo sapiens
  source 1..20: mol_type = other RNA
caggcgacgagtttgaactg

SEQ ID NO: 932 - RNA, 20 nt, Homo sapiens
  source 1..20: mol_type = other RNA
agtttgaactgcggtaccgg

SEQ ID NO: 933 - RNA, 20 nt, Homo sapiens
  source 1..20: mol_type = other RNA
gaccccagtttaccccatcc

SEQ ID NO: 934 - RNA, 20 nt, Homo sapiens
  source 1..20: mol_type = other RNA
cccagctccacatcacccca

SEQ ID NO: 935 - RNA, 20 nt, Homo sapiens
  source 1..20: mol_type = other RNA
ttccgggatggggtaaactg

SEQ ID NO: 936 - RNA, 20 nt, Homo sapiens
  source 1..20: mol_type = other RNA
tcaggtcactgaatgcccgc

SEQ ID NO: 937 - RNA, 20 nt, Homo sapiens
  source 1..20: mol_type = other RNA
agcagtaaagcaagcgctga

SEQ ID NO: 938 - RNA, 20 nt, Homo sapiens
  source 1..20: mol_type = other RNA
ggtaaactggggtcgcattg

SEQ ID NO: 939 - RNA, 20 nt, Homo sapiens
  source 1..20: mol_type = other RNA
tttcccagaaaggatacagc

SEQ ID NO: 940 - RNA, 20 nt, Homo sapiens
  source 1..20: mol_type = other RNA
acgagtttgaactgcggtac

SEQ ID NO: 941 - RNA, 20 nt, Homo sapiens
  source 1..20: mol_type = other RNA
cttgctttactgctgccatg

SEQ ID NO: 942 - RNA, 20 nt, Homo sapiens
  source 1..20: mol_type = other RNA
gccagtggctccattcaccg

SEQ ID NO: 943 - RNA, 20 nt, Homo sapiens
  source 1..20: mol_type = other RNA
ctccgattcagtcccttctg

SEQ ID NO: 944 - RNA, 20 nt, Homo sapiens
  source 1..20: mol_type = other RNA
cagcagtttggatgcccggg

SEQ ID NO: 945 - RNA, 20 nt, Homo sapiens
  source 1..20: mol_type = other RNA
tgtggaagagaacaggactg

SEQ ID NO: 946 - RNA, 20 nt, Homo sapiens
  source 1..20: mol_type = other RNA
ctggagtcagtttagtgatg

SEQ ID NO: 947 - RNA, 20 nt, Homo sapiens
  source 1..20: mol_type = other RNA
agtaaagcaagcgctgaggg

SEQ ID NO: 948 - RNA, 20 nt, Homo sapiens
  source 1..20: mol_type = other RNA
gtttgaactgcggtaccggc

SEQ ID NO: 949 - RNA, 20 nt, Homo sapiens
  source 1..20: mol_type = other RNA
tgaatgaactcttccgggat

SEQ ID NO: 950 - RNA, 20 nt, Homo sapiens
  source 1..20: mol_type = other RNA
gctctgatatgctgtccctg

SEQ ID NO: 951 - RNA, 20 nt, Homo sapiens
  source 1..20: mol_type = other RNA
cagtggctccattcaccgcg

SEQ ID NO: 952 - RNA, 20 nt, Homo sapiens
  source 1..20: mol_type = other RNA
gagacccccagtgccatcaa

SEQ ID NO: 953 - RNA, 20 nt, Homo sapiens
  source 1..20: mol_type = other RNA
ggccccagaagggactgaat

SEQ ID NO: 954 - RNA, 20 nt, Homo sapiens
  source 1..20: mol_type = other RNA
ccatcaatggcaacccatcc

SEQ ID NO: 955 - RNA, 20 nt, Homo sapiens
  source 1..20: mol_type = other RNA
cacgcacagtgccccgccga

SEQ ID NO: 956 - RNA, 20 nt, Homo sapiens
  source 1..20: mol_type = other RNA
ggccttctttgagttcggtg

SEQ ID NO: 957 - RNA, 20 nt, Homo sapiens
  source 1..20: mol_type = other RNA
tggacatctcggcgaagtcg

SEQ ID NO: 958 - RNA, 20 nt, Homo sapiens
  source 1..20: mol_type = other RNA
tgtcgcagaggggctacgag

SEQ ID NO: 959 - RNA, 20 nt, Homo sapiens
  source 1..20: mol_type = other RNA
cgtggcaaagcgtccccgcg

SEQ ID NO: 960 - RNA, 20 nt, Homo sapiens
  source 1..20: mol_type = other RNA
ctgacgcccttcaccgcgcg

SEQ ID NO: 961 - RNA, 20 nt, Homo sapiens
  source 1..20: mol_type = other RNA
cattataagctgtcgcagag

SEQ ID NO: 962 - RNA, 20 nt, Homo sapiens
  source 1..20: mol_type = other RNA
acatctcggcgaagtcgcgg

SEQ ID NO: 963 - RNA, 20 nt, Homo sapiens
  source 1..20: mol_type = other RNA
attgtggccttctttgagtt

SEQ ID NO: 964 - RNA, 20 nt, Homo sapiens
  source 1..20: mol_type = other RNA
gaccccaccgaactcaaaga

SEQ ID NO: 965 - RNA, 20 nt, Homo sapiens
  source 1..20: mol_type = other RNA
aagcgtccccgcgcggtgaa

SEQ ID NO: 966 - RNA, 20 nt, Homo sapiens
  source 1..20: mol_type = other RNA
gcggggacgctttgccacgg

SEQ ID NO: 967 - RNA, 20 nt, Homo sapiens
  source 1..20: mol_type = other RNA
ccattataagctgtcgcaga

SEQ ID NO: 968 - RNA, 20 nt, Homo sapiens
  source 1..20: mol_type = other RNA
cgcgcggggacgctttgcca

SEQ ID NO: 969 - RNA, 20 nt, Homo sapiens
  source 1..20: mol_type = other RNA
tgtacttcatcactatctcc

SEQ ID NO: 970 - RNA, 20 nt, Homo sapiens
  source 1..20: mol_type = other RNA
gcggcgaggtcctggcgacc

SEQ ID NO: 971 - RNA, 20 nt, Homo sapiens
  source 1..20: mol_type = other RNA
gtcgcagaggggctacgagt

SEQ ID NO: 972 - RNA, 20 nt, Homo sapiens
  source 1..20: mol_type = other RNA
gccccatccagccgcatccc

SEQ ID NO: 973 - RNA, 20 nt, Homo sapiens
  source 1..20: mol_type = other RNA
aggggctacgagtgggatgc

SEQ ID NO: 974 - RNA, 20 nt, Homo sapiens
  source 1..20: mol_type = other RNA
gaggggctacgagtgggatg

SEQ ID NO: 975 - RNA, 20 nt, Homo sapiens
  source 1..20: mol_type = other RNA
acctgacgcccttcaccgcg

SEQ ID NO: 976 - RNA, 20 nt, Homo sapiens
  source 1..20: mol_type = other RNA
gcggcgggagaagtcgtcgc

SEQ ID NO: 977 - RNA, 20 nt, Homo sapiens
  source 1..20: mol_type = other RNA
agaagtcgtcgccggcctgg

SEQ ID NO: 978 - RNA, 20 nt, Homo sapiens
  source 1..20: mol_type = other RNA
aggagaagatgcccggtgcg

SEQ ID NO: 979 - RNA, 20 nt, Homo sapiens
  source 1..20: mol_type = other RNA
ggaggagctcttcagggacg

SEQ ID NO: 980 - RNA, 20 nt, Homo sapiens
  source 1..20: mol_type = other RNA
ggtggcaccgggctgagcgc

SEQ ID NO: 981 - RNA, 20 nt, Homo sapiens
  source 1..20: mol_type = other RNA
gtttcatccaggatcgagca

SEQ ID NO: 982 - RNA, 20 nt, Homo sapiens
  source 1..20: mol_type = other RNA
tcggaaaaagacctctcggg

SEQ ID NO: 983 - RNA, 20 nt, Homo sapiens
  source 1..20: mol_type = other RNA
ggacacagactccccccgag

SEQ ID NO: 984 - RNA, 20 nt, Homo sapiens
  source 1..20: mol_type = other RNA
cgagtgtctcaagcgcatcg

SEQ ID NO: 985 - RNA, 20 nt, Homo sapiens
  source 1..20: mol_type = other RNA
actcggaaaaagacctctcg

SEQ ID NO: 986 - RNA, 20 nt, Homo sapiens
  source 1..20: mol_type = other RNA
ctcggaaaaagacctctcgg

SEQ ID NO: 987 - RNA, 20 nt, Homo sapiens
  source 1..20: mol_type = other RNA
agtttcatccaggatcgagc

SEQ ID NO: 988 - RNA, 20 nt, Homo sapiens
  source 1..20: mol_type = other RNA
agtagaaaagggcgacaacc

SEQ ID NO: 989 - RNA, 20 nt, Homo sapiens
  source 1..20: mol_type = other RNA
gggggagtctgtgtccacgg

SEQ ID NO: 990 - RNA, 20 nt, Homo sapiens
  source 1..20: mol_type = other RNA
ctgcaggatgattgccgccg

SEQ ID NO: 991 - RNA, 20 nt, Homo sapiens
  source 1..20: mol_type = other RNA
ccactcggaaaaagacctct

SEQ ID NO: 992 - RNA, 20 nt, Homo sapiens
  source 1..20: mol_type = other RNA
tctgacggcaacttcaactg

SEQ ID NO: 993 - RNA, 20 nt, Homo sapiens
  source 1..20: mol_type = other RNA
agcaaactggtgctcaaggt

SEQ ID NO: 994 - RNA, 20 nt, Homo sapiens
  source 1..20: mol_type = other RNA
agcgagtgtctcaagcgcat

SEQ ID NO: 995 - RNA, 20 nt, Homo sapiens
  source 1..20: mol_type = other RNA
tccccactctagtttcatcc

SEQ ID NO: 996 - RNA, 20 nt, Homo sapiens
  source 1..20: mol_type = other RNA
ttcttggtggacgcatcctg

SEQ ID NO: 997 - RNA, 20 nt, Homo sapiens
  source 1..20: mol_type = other RNA
tggacgcatcctgaggcacc

SEQ ID NO: 998 - RNA, 20 nt, Homo sapiens
  source 1..20: mol_type = other RNA
cactcggaaaaagacctctc

SEQ ID NO: 999 - RNA, 20 nt, Homo sapiens
  source 1..20: mol_type = other RNA
aggatcgagcagggcgaatg

SEQ ID NO: 1000 - RNA, 20 nt, Homo sapiens
  source 1..20: mol_type = other RNA
atgatctgctcagagctggt

SEQ ID NO: 1001 - RNA, 20 nt, Homo sapiens
  source 1..20: mol_type = other RNA
aaaacatgtcagctgccact

SEQ ID NO: 1002 - RNA, 20 nt, Homo sapiens
  source 1..20: mol_type = other RNA
ttctgacggcaacttcaact

SEQ ID NO: 1003 - RNA, 20 nt, Homo sapiens
  source 1..20: mol_type = other RNA
acagtaacatggagctgcag

SEQ ID NO: 1004 - RNA, 20 nt, Homo sapiens
  source 1..20: mol_type = other RNA
gatcgagcagggcgaatggg

SEQ ID NO: 1005 - RNA, 20 nt, Homo sapiens
  source 1..20: mol_type = other RNA
ggacgaactggacagtaaca

SEQ ID NO: 1006 - RNA, 20 nt, Homo sapiens
  source 1..20: mol_type = other RNA
acatctgaaggatccggaca

SEQ ID NO: 1007 - RNA, 20 nt, Homo sapiens
  source 1..20: mol_type = other RNA
taatccattcgatctcacca

SEQ ID NO: 1008 - RNA, 20 nt, Homo sapiens
  source 1..20: mol_type = other RNA
ttattacagtagggccccgt

SEQ ID NO: 1009 - RNA, 20 nt, Homo sapiens
  source 1..20: mol_type = other RNA
tggatgtaaaaagtccagga

SEQ ID NO: 1010 - RNA, 20 nt, Homo sapiens
  source 1..20: mol_type = other RNA
ctggatgtaaaaagtccagg

SEQ ID NO: 1011 - RNA, 20 nt, Homo sapiens
  source 1..20: mol_type = other RNA
gactaccctctcatcccagt

SEQ ID NO: 1012 - RNA, 20 nt, Homo sapiens
  source 1..20: mol_type = other RNA
aatttcactgcaaacccacg

SEQ ID NO: 1013 - RNA, 20 nt, Homo sapiens
  source 1..20: mol_type = other RNA
acacagttcgggaccctcgt

SEQ ID NO: 1014 - RNA, 20 nt, Homo sapiens
  source 1..20: mol_type = other RNA
gtggagaaccgaactgcgat

SEQ ID NO: 1015 - RNA, 20 nt, Homo sapiens
  source 1..20: mol_type = other RNA
tgacattaccaaatactcca

SEQ ID NO: 1016 - RNA, 20 nt, Homo sapiens
  source 1..20: mol_type = other RNA
ggatgtaaaaagtccaggag

SEQ ID NO: 1017 - RNA, 20 nt, Homo sapiens
  source 1..20: mol_type = other RNA
ctttcttgttcagtgatcgg

SEQ ID NO: 1018 - RNA, 20 nt, Homo sapiens
  source 1..20: mol_type = other RNA
gtgatccatatccattcatg

SEQ ID NO: 1019 - RNA, 20 nt, Homo sapiens
  source 1..20: mol_type = other RNA
atgagagggtagtccttgtg

SEQ ID NO: 1020 - RNA, 20 nt, Homo sapiens
  source 1..20: mol_type = other RNA
caagctggttaatgcaaatg

SEQ ID NO: 1021 - RNA, 20 nt, Homo sapiens
  source 1..20: mol_type = other RNA
atttcactgcaaacccacga

SEQ ID NO: 1022 - RNA, 20 nt, Homo sapiens
  source 1..20: mol_type = other RNA
gctggttaatgcaaatgggg

SEQ ID NO: 1023 - RNA, 20 nt, Homo sapiens
  source 1..20: mol_type = other RNA
gatgcagagactcaggacgt

SEQ ID NO: 1024 - RNA, 20 nt, Homo sapiens
  source 1..20: mol_type = other RNA
gatggtaactgggatctcgt

SEQ ID NO: 1025 - RNA, 20 nt, Homo sapiens
  source 1..20: mol_type = other RNA
agtggagaaccgaactgcga

SEQ ID NO: 1026 - RNA, 20 nt, Homo sapiens
  source 1..20: mol_type = other RNA
ataaaccaacttaccaacag

SEQ ID NO: 1027 - RNA, 20 nt, Homo sapiens
  source 1..20: mol_type = other RNA
ctcaccttggtgagatcgaa

SEQ ID NO: 1028 - RNA, 20 nt, Homo sapiens
  source 1..20: mol_type = other RNA
gagagagttgtgcatgctaa

SEQ ID NO: 1029 - RNA, 20 nt, Homo sapiens
  source 1..20: mol_type = other RNA
caacatgccacctggcattg

SEQ ID NO: 1030 - RNA, 20 nt, Homo sapiens
  source 1..20: mol_type = other RNA
agatgcggcgagactttccc

SEQ ID NO: 1031 - RNA, 20 nt, Homo sapiens
  source 1..20: mol_type = other RNA
taaggatacgatctgtacct

SEQ ID NO: 1032 - RNA, 20 nt, Homo sapiens
  source 1..20: mol_type = other RNA
tcgctactacagagcacccg

SEQ ID NO: 1033 - RNA, 20 nt, Homo sapiens
  source 1..20: mol_type = other RNA
tgatattagatattgatcag

SEQ ID NO: 1034 - RNA, 20 nt, Homo sapiens
  source 1..20: mol_type = other RNA
agaatcagactcatgccaag

SEQ ID NO: 1035 - RNA, 20 nt, Homo sapiens
  source 1..20: mol_type = other RNA
cagcatctgatagagaaggt

SEQ ID NO: 1036 - RNA, 20 nt, Homo sapiens
  source 1..20: mol_type = other RNA
atgggagaaatgatcaaagg

SEQ ID NO: 1037 - RNA, 20 nt, Homo sapiens
  source 1..20: mol_type = other RNA
cttctctatcagatgctgtg

SEQ ID NO: 1038 - RNA, 20 nt, Homo sapiens
  source 1..20: mol_type = other RNA
cataagaactagctctctgt

SEQ ID NO: 1039 - RNA, 20 nt, Homo sapiens
  source 1..20: mol_type = other RNA
tcaacgtaagtccttactgt

SEQ ID NO: 1040 - RNA, 20 nt, Homo sapiens
  source 1..20: mol_type = other RNA
tagtagcgagtcactacata

SEQ ID NO: 1041 - RNA, 20 nt, Homo sapiens
  source 1..20: mol_type = other RNA
tctttgccaagtgattcaga

SEQ ID NO: 1042 - RNA, 20 nt, Homo sapiens
  source 1..20: mol_type = other RNA
agaaactgcaaccaacagta

SEQ ID NO: 1043 - RNA, 20 nt, Homo sapiens
  source 1..20: mol_type = other RNA
ctagctccatctgaatcact

SEQ ID NO: 1044 - RNA, 20 nt, Homo sapiens
  source 1..20: mol_type = other RNA
cccgaggtcatccttggcat

SEQ ID NO: 1045 - RNA, 20 nt, Homo sapiens
  source 1..20: mol_type = other RNA
aatttaaaacctataggctc

SEQ ID NO: 1046 - RNA, 20 nt, Homo sapiens
  source 1..20: mol_type = other RNA
cccatgccaaggatgacctc

SEQ ID NO: 1047 - RNA, 20 nt, Homo sapiens
  source 1..20: mol_type = other RNA
ataaggatacgatctgtacc

SEQ ID NO: 1048 - RNA, 20 nt, Homo sapiens
  source 1..20: mol_type = unassigned RNA
gaaaacagacctaaatatgc

SEQ ID NO: 1049 - RNA, 20 nt, Homo sapiens
  source 1..20: mol_type = unassigned RNA
gaatcagactcatgccaagc

SEQ ID NO: 1050 - RNA, 20 nt, Homo sapiens
  source 1..20: mol_type = unassigned RNA
gaataattccagcagaatga

SEQ ID NO: 1051 - RNA, 20 nt, Homo sapiens
  source 1..20: mol_type = unassigned RNA
ttcttcatgaattcaggaca

SEQ ID NO: 1052 - RNA, 20 nt, Homo sapiens
  source 1..20: mol_type = unassigned RNA
gcccatgccaaggatgacct

SEQ ID NO: 1053 - RNA, 20 nt, Homo sapiens
  source 1..20: mol_type = unassigned RNA
aattcttctagggatttctg

SEQ ID NO: 1054 - RNA, 20 nt, Homo sapiens
  source 1..20: mol_type = unassigned RNA
gaagattcttgacttcggtc

SEQ ID NO: 1055 - RNA, 20 nt, Homo sapiens
  source 1..20: mol_type = unassigned RNA
cagctgggaaaaggacatca

SEQ ID NO: 1056 - RNA, 20 nt, Homo sapiens
  source 1..20: mol_type = unassigned RNA
actcggagcgtagaatcatg

SEQ ID NO: 1057 - RNA, 20 nt, Homo sapiens
  source 1..20: mol_type = unassigned RNA
ctcacgatactcctggacgt

SEQ ID NO: 1058 - RNA, 20 nt, Homo sapiens
  source 1..20: mol_type = unassigned RNA
gggagcagcaaatcccatga

SEQ ID NO: 1059 - RNA, 20 nt, Homo sapiens
  source 1..20: mol_type = unassigned RNA
gtgtaacgttccatgacagg

SEQ ID NO: 1060 - RNA, 20 nt, Homo sapiens
  source 1..20: mol_type = unassigned RNA
ttccatggtcaaacctcaca

SEQ ID NO: 1061 - RNA, 20 nt, Homo sapiens
  source 1..20: mol_type = unassigned RNA
ctggtgtaagaagtctctgg

SEQ ID NO: 1062 - RNA, 20 nt, Homo sapiens
  source 1..20: mol_type = unassigned RNA
tgccaccgccgcgaccaatg

SEQ ID NO: 1063 - RNA, 20 nt, Homo sapiens
  source 1..20: mol_type = unassigned RNA
ctggtggtatccagccgtaa

SEQ ID NO: 1064 - RNA, 20 nt, Homo sapiens
  source 1..20: mol_type = unassigned RNA
tcccttcaccaacaagcgaa

SEQ ID NO: 1065 - RNA, 20 nt, Homo sapiens
  source 1..20: mol_type = unassigned RNA
gaggtgtaacgttccatgac

SEQ ID NO: 1066 - RNA, 20 nt, Homo sapiens
  source 1..20: mol_type = unassigned RNA
tttcaaatgacccttacggc

SEQ ID NO: 1067 - RNA, 20 nt, Homo sapiens
  source 1..20: mol_type = unassigned RNA
cccatgaaggaacggctcga

SEQ ID NO: 1068 - RNA, 20 nt, Homo sapiens
  source 1..20: mol_type = unassigned RNA
ggcctcaccttgaccatgtg

SEQ ID NO: 1069 - RNA, 20 nt, Homo sapiens
  source 1..20: mol_type = unassigned RNA
ggtcaaacctcacatggtca

SEQ ID NO: 1070 - RNA, 20 nt, Homo sapiens
  source 1..20: mol_type = unassigned RNA
ttactcggagcgtagaatca

SEQ ID NO: 1071 - RNA, 20 nt, Homo sapiens
  source 1..20: mol_type = unassigned RNA
gcacaaactcacgatactcc

SEQ ID NO: 1072 - RNA, 20 nt, Homo sapiens
  source 1..20: mol_type = unassigned RNA
tactcggagcgtagaatcat

SEQ ID NO: 1073 - RNA, 20 nt, Homo sapiens
  source 1..20: mol_type = unassigned RNA
ttctcctaggtactcaatgc

SEQ ID NO: 1074 - RNA, 20 nt, Homo sapiens
  source 1..20: mol_type = unassigned RNA
ccctctcacctcattggtcg

SEQ ID NO: 1075 - RNA, 20 nt, Homo sapiens
  source 1..20: mol_type = unassigned RNA
accagagacttcttacacca

SEQ ID NO: 1076 - RNA, 20 nt, Homo sapiens
  source 1..20: mol_type = unassigned RNA
tctggtggtatccagccgta

SEQ ID NO: 1077 - RNA, 20 nt, Homo sapiens
  source 1..20: mol_type = unassigned RNA
caccagagacttcttacacc

SEQ ID NO: 1078 - RNA, 20 nt, Homo sapiens
  source 1..20: mol_type = unassigned RNA
tcgggctgcccagatcttgg

SEQ ID NO: 1079 - RNA, 20 nt, Homo sapiens
  source 1..20: mol_type = unassigned RNA
ggtcccagctgggacgcgcg

SEQ ID NO: 1080 - RNA, 20 nt, Homo sapiens
  source 1..20: mol_type = unassigned RNA
gctcagcccgggcgcgcaac

SEQ ID NO: 1081 - RNA, 20 nt, Homo sapiens
  source 1..20: mol_type = unassigned RNA
gatgtatatcgctccaacac

SEQ ID NO: 1082 - RNA, 20 nt, Homo sapiens
  source 1..20: mol_type = unassigned RNA
tgtaggcatcttgtactgat

SEQ ID NO: 1083 - RNA, 20 nt, Homo sapiens
  source 1..20: mol_type = unassigned RNA
gtatatcgctccaacacagg

SEQ ID NO: 1084 - RNA, 20 nt, Homo sapiens
  source 1..20: mol_type = unassigned RNA
tgatgtagtatcgggagtgg

SEQ ID NO: 1085 - RNA, 20 nt, Homo sapiens
  source 1..20: mol_type = unassigned RNA
ccgtccgaagtcggcgacag

SEQ ID NO: 1086 - RNA, 20 nt, Homo sapiens
  source 1..20: mol_type = unassigned RNA
ggaaatgtatgatgtagtat

SEQ ID NO: 1087 - RNA, 20 nt, Homo sapiens
  source 1..20: mol_type = unassigned RNA
ccggccgctgtcgccgactt

SEQ ID NO: 1088 - RNA, 20 nt, Homo sapiens
  source 1..20: mol_type = unassigned RNA
ctcgggatgccgtccgaagt

SEQ ID NO: 1089 - RNA, 20 nt, Homo sapiens
  source 1..20: mol_type = unassigned RNA
ccgctgtcgccgacttcgga

SEQ ID NO: 1090 - RNA, 20 nt, Homo sapiens
  source 1..20: mol_type = unassigned RNA
tgattacctgccattccgca

SEQ ID NO: 1091 - RNA, 20 nt, Homo sapiens
  source 1..20: mol_type = unassigned RNA
gccttgagaagggtagtctc

SEQ ID NO: 1092 - RNA, 20 nt, Homo sapiens
  source 1..20: mol_type = unassigned RNA
actgttacctttactaaatg

SEQ ID NO: 1093 - RNA, 20 nt, Homo sapiens
  source 1..20: mol_type = unassigned RNA
gattacctgccattccgcac

SEQ ID NO: 1094 - RNA, 20 nt, Homo sapiens
  source 1..20: mol_type = unassigned RNA
gaaatgtatgatgtagtatc

SEQ ID NO: 1095 - RNA, 20 nt, Homo sapiens
  source 1..20: mol_type = unassigned RNA
gttcgtgcacatatctcctt

SEQ ID NO: 1096 - RNA, 20 nt, Homo sapiens
  source 1..20: mol_type = unassigned RNA
gtatgatgtagtatcgggag

SEQ ID NO: 1097 - RNA, 20 nt, Homo sapiens
  source 1..20: mol_type = unassigned RNA
gcgcaggcgcccgtgcggaa

SEQ ID NO: 1098 - RNA, 20 nt, Homo sapiens
  source 1..20: mol_type = unassigned RNA
ttgtaggcatcttgtactga

SEQ ID NO: 1099 - RNA, 20 nt, Homo sapiens
  source 1..20: mol_type = unassigned RNA
ggtgaaacctcatttagtaa

SEQ ID NO: 1100 - RNA, 20 nt, Homo sapiens
  source 1..20: mol_type = unassigned RNA
atatacatcagtagtaacct

SEQ ID NO: 1101 - RNA, 20 nt, Homo sapiens
  source 1..20: mol_type = unassigned RNA
tatctccttaggcaaaattg

SEQ ID NO: 1102 - RNA, 20 nt, Homo sapiens
  source 1..20: mol_type = unassigned RNA
gatgttatatcaaagagatc

SEQ ID NO: 1103 - RNA, 20 nt, Homo sapiens
  source 1..20: mol_type = unassigned RNA
ggcaaaattgaggtatgtag

SEQ ID NO: 1104 - RNA, 20 nt, Homo sapiens
  source 1..20: mol_type = unassigned RNA
ttcagatatttagcttcctg

SEQ ID NO: 1105 - RNA, 20 nt, Homo sapiens
  source 1..20: mol_type = unassigned RNA
ctgcaccattaataaacaaa

SEQ ID NO: 1106 - RNA, 20 nt, Homo sapiens
  source 1..20: mol_type = unassigned RNA
ggtgatgcacggctacaagg

SEQ ID NO: 1107 - RNA, 20 nt, Homo sapiens
  source 1..20: mol_type = unassigned RNA
tgtccccgcaaagaacaggt

SEQ ID NO: 1108 - RNA, 20 nt, Homo sapiens
  source 1..20: mol_type = unassigned RNA
ggacggtatcaccgtgactg

SEQ ID NO: 1109 - RNA, 20 nt, Homo sapiens
  source 1..20: mol_type = unassigned RNA
gagcgcttgtacacaatgga

SEQ ID NO: 1110 - RNA, 20 nt, Homo sapiens
  source 1..20: mol_type = unassigned RNA
tgcagagcgcttgtacacaa

SEQ ID NO: 1111 - RNA, 20 nt, Homo sapiens
  source 1..20: mol_type = unassigned RNA
atgaaataccctgagatcga

SEQ ID NO: 1112 - RNA, 20 nt, Homo sapiens
  source 1..20: mol_type = unassigned RNA
cattgtagtcaaaatgcttg

SEQ ID NO: 1113 - RNA, 20 nt, Homo sapiens
  source 1..20: mol_type = unassigned RNA
gaagcactcaggaagaccca

SEQ ID NO: 1114 - RNA, 20 nt, Homo sapiens
  source 1..20: mol_type = unassigned RNA
tggccgacctgttctttgcg

SEQ ID NO: 1115 - RNA, 20 nt, Homo sapiens
  source 1..20: mol_type = unassigned RNA
ccctccggaactatgggatg

SEQ ID NO: 1116 - RNA, 20 nt, Homo sapiens
  source 1..20: mol_type = unassigned RNA
gcacggctacaaggcggtga

SEQ ID NO: 1117 - RNA, 20 nt, Homo sapiens
  source 1..20: mol_type = unassigned RNA
tgcagggcgcgcagccgatg

SEQ ID NO: 1118 - RNA, 20 nt, Homo sapiens
  source 1..20: mol_type = unassigned RNA
cccacgtacagcgtgaacac

SEQ ID NO: 1119 - RNA, 20 nt, Homo sapiens
  source 1..20: mol_type = unassigned RNA
atgtcggctatgacgttgca

SEQ ID NO: 1120 - RNA, 20 nt, Homo sapiens
  source 1..20: mol_type = unassigned RNA
ccggtgttcacgctgtacgt

SEQ ID NO: 1121 - RNA, 20 nt, Homo sapiens
  source 1..20: mol_type = unassigned RNA
caatgagagccggatccaga

SEQ ID NO: 1122 - RNA, 20 nt, Homo sapiens
  source 1..20: mol_type = unassigned RNA
catttccacgagcaggcagt

SEQ ID NO: 1123 - RNA, 20 nt, Homo sapiens
  source 1..20: mol_type = unassigned RNA
tattcccaagtccttcaccc

SEQ ID NO: 1124 - RNA, 20 nt, Homo sapiens
  source 1..20: mol_type = unassigned RNA
gggtggtcagggaaaaccgc

SEQ ID NO: 1125 - RNA, 20 nt, Homo sapiens
  source 1..20: mol_type = unassigned RNA
gcaatgagagccggatccag

SEQ ID NO: 1126 - RNA, 20 nt, Homo sapiens
  source 1..20: mol_type = unassigned RNA
tgtgcgcatggaacgcgggg

SEQ ID NO: 1127 - RNA, 20 nt, Homo sapiens
  source 1..20: mol_type = unassigned RNA
ggttcccgatgatgggaagc

SEQ ID NO: 1128 - RNA, 20 nt, Homo sapiens
  source 1..20: mol_type = unassigned RNA
tccacctactcagcactccc

SEQ ID NO: 1129 - RNA, 20 nt, Homo sapiens
  source 1..20: mol_type = unassigned RNA
cagaaaagtcataaaaaatg

SEQ ID NO: 1130 - RNA, 20 nt, Homo sapiens
  source 1..20: mol_type = unassigned RNA
ggaggcaggtgcacagcagc

SEQ ID NO: 1131 - RNA, 20 nt, Homo sapiens
  source 1..20: mol_type = unassigned RNA
acagccgccaataagaacaa

SEQ ID NO: 1132 - RNA, 20 nt, Homo sapiens
  source 1..20: mol_type = unassigned RNA
tcttgtttaggcatcatctg

SEQ ID NO: 1133 - RNA, 20 nt, Homo sapiens
  source 1..20: mol_type = unassigned RNA
atctccatggtctctttggg

SEQ ID NO: 1134 - RNA, 20 nt, Homo sapiens
  source 1..20: mol_type = unassigned RNA
tcttccgcccaaagagacca

SEQ ID NO: 1135 - RNA, 20 nt, Homo sapiens
  source 1..20: mol_type = unassigned RNA
ggctgtgtaagagtatccag

SEQ ID NO: 1136 - RNA, 20 nt, Homo sapiens
  source 1..20: mol_type = unassigned RNA
ctttgggcggaagacaggtc

SEQ ID NO: 1137 - RNA, 20 nt, Homo sapiens
  source 1..20: mol_type = unassigned RNA
tgccacaccgttgaaaaggg

SEQ ID NO: 1138 - RNA, 20 nt, Homo sapiens
  source 1..20: mol_type = unassigned RNA
ttcttgtttaggcatcatct

SEQ ID NO: 1139 - RNA, 20 nt, Homo sapiens
  source 1..20: mol_type = unassigned RNA
cttacctttgttcttattgg

SEQ ID NO: 1140 - RNA, 20 nt, Homo sapiens
  source 1..20: mol_type = unassigned RNA
cagtgccacaccgttgaaaa

SEQ ID NO: 1141 - RNA, 20 nt, Homo sapiens
  source 1..20: mol_type = unassigned RNA
ggtctctttgggcggaagac

SEQ ID NO: 1142 - RNA, 20 nt, Homo sapiens
  source 1..20: mol_type = unassigned RNA
aagactgggccaaatctcca

SEQ ID NO: 1143 - RNA, 20 nt, Homo sapiens
  source 1..20: mol_type = unassigned RNA
ctggggagaggatacactga

SEQ ID NO: 1144 - RNA, 20 nt, Homo sapiens
  source 1..20: mol_type = unassigned RNA
cggctgtgtaagagtatcca

SEQ ID NO: 1145 - RNA, 20 nt, Homo sapiens
  source 1..20: mol_type = unassigned RNA
tttaggcatcatctggggag

SEQ ID NO: 1146 - RNA, 20 nt, Homo sapiens
  source 1..20: mol_type = unassigned RNA
gcggctgtgtaagagtatcc

SEQ ID NO: 1147 - RNA, 20 nt, Homo sapiens
  source 1..20: mol_type = unassigned RNA
aatcccaagaagtacatccc

SEQ ID NO: 1148 - RNA, 20 nt, Homo sapiens
  source 1..20: mol_type = unassigned RNA
tttcttgtttaggcatcatc

SEQ ID NO: 1149 - RNA, 20 nt, Homo sapiens
  source 1..20: mol_type = unassigned RNA
actcttacctttgttcttat

SEQ ID NO: 1150 - RNA, 20 nt, Homo sapiens
  source 1..20: mol_type = unassigned RNA
ccagtgccacaccgttgaaa

SEQ ID NO: 1151 - RNA, 20 nt, Homo sapiens
  source 1..20: mol_type = unassigned RNA
ctttgtcggcattaagaaga

SEQ ID NO: 1152 - RNA, 20 nt, Homo sapiens
  source 1..20: mol_type = unassigned RNA
aatatgggtgatgttgagaa

SEQ ID NO: 1153 - RNA, 20 nt, Homo sapiens
  source 1..20: mol_type = unassigned RNA
agggaggcaagcacaagact

SEQ ID NO: 1154 - RNA, 20 nt, Homo sapiens
  source 1..20: mol_type = unassigned RNA
ggaacaaaaatgatctttgt

SEQ ID NO: 1155 - RNA, 20 nt, Homo sapiens
  source 1..20: mol_type = unassigned RNA
cggaagacaggtcaggcccc

SEQ ID NO: 1156 - RNA, 20 nt, Homo sapiens
  source 1..20: mol_type = unassigned RNA
tcctgacttcagagcacgag

SEQ ID NO: 1157 - RNA, 20 nt, Homo sapiens
  source 1..20: mol_type = unassigned RNA
gcagagtgtgtcctcttcag

SEQ ID NO: 1158 - RNA, 20 nt, Homo sapiens
  source 1..20: mol_type = unassigned RNA
cacgtagcatgccagcacca

SEQ ID NO: 1159 - RNA, 20 nt, Homo sapiens
  source 1..20: mol_type = unassigned RNA
ctccgcaaataccactgaag

SEQ ID NO: 1160 - RNA, 20 nt, Homo sapiens
  source 1..20: mol_type = unassigned RNA
tgaagaaggggagcatctcg

SEQ ID NO: 1161 - RNA, 20 nt, Homo sapiens
  source 1..20: mol_type = unassigned RNA
gcactcactgagatgcttgt

SEQ ID NO: 1162 - RNA, 20 nt, Homo sapiens
  source 1..20: mol_type = unassigned RNA
gagcatctcggggattacca

SEQ ID NO: 1163 - RNA, 20 nt, Homo sapiens
  source 1..20: mol_type = unassigned RNA
ttgcgtttgcaggttactac

SEQ ID NO: 1164 - RNA, 20 nt, Homo sapiens
  source 1..20: mol_type = unassigned RNA
agtacatcaatgtgaagaag

SEQ ID NO: 1165 - RNA, 20 nt, Homo sapiens
  source 1..20: mol_type = unassigned RNA
atgcgggacttcagtcctag

SEQ ID NO: 1166 - RNA, 20 nt, Homo sapiens
  source 1..20: mol_type = unassigned RNA
caagtacatcaatgtgaaga

SEQ ID NO: 1167 - RNA, 20 nt, Homo sapiens
  source 1..20: mol_type = unassigned RNA
tgatgtacttgttgtagtac

SEQ ID NO: 1168 - RNA, 20 nt, Homo sapiens
  source 1..20: mol_type = unassigned RNA
acttctggaggtcaaactgg

SEQ ID NO: 1169 - RNA, 20 nt, Homo sapiens
  source 1..20: mol_type = unassigned RNA
ttccgtttcagtaccagtga

SEQ ID NO: 1170 - RNA, 20 nt, Homo sapiens
  source 1..20: mol_type = unassigned RNA
actgagatgcttgtaggaaa

SEQ ID NO: 1171 - RNA, 20 nt, Homo sapiens
  source 1..20: mol_type = unassigned RNA
ctcggggattaccatggtgc

SEQ ID NO: 1172 - RNA, 20 nt, Homo sapiens
  source 1..20: mol_type = unassigned RNA
aagtacatcaatgtgaagaa

SEQ ID NO: 1173 - RNA, 20 nt, Homo sapiens
  source 1..20: mol_type = unassigned RNA
gaaggacaagaaacttctgg

SEQ ID NO: 1174 - RNA, 20 nt, Homo sapiens
  source 1..20: mol_type = unassigned RNA
gactccaaaatggcgtcagt

SEQ ID NO: 1175 - RNA, 20 nt, Homo sapiens
  source 1..20: mol_type = unassigned RNA
tgtgaagaaggggagcatct

SEQ ID NO: 1176 - RNA, 20 nt, Homo sapiens
  source 1..20: mol_type = unassigned RNA
tcccgcatcaagatccagct

SEQ ID NO: 1177 - RNA, 20 nt, Homo sapiens
  source 1..20: mol_type = unassigned RNA
aacgctccgaaaatgccact

SEQ ID NO: 1178 - RNA, 20 nt, Homo sapiens
  source 1..20: mol_type = unassigned RNA
gtcctcttcagtggtatttg

SEQ ID NO: 1179 - RNA, 20 nt, Homo sapiens
  source 1..20: mol_type = unassigned RNA
gccaagctggatcttgatgc

SEQ ID NO: 1180 - RNA, 20 nt, Homo sapiens
  source 1..20: mol_type = unassigned RNA
ctcaccaactgacgccattt

SEQ ID NO: 1181 - RNA, 20 nt, Homo sapiens
  source 1..20: mol_type = unassigned RNA
ggtggacgcggtcgtcatgg

SEQ ID NO: 1182 - RNA, 20 nt, Homo sapiens
  source 1..20: mol_type = unassigned RNA
gggttccaatactcacatgg

SEQ ID NO: 1183 - RNA, 20 nt, Homo sapiens
  source 1..20: mol_type = unassigned RNA
caccatggacaggtaaacgt

SEQ ID NO: 1184 - RNA, 20 nt, Homo sapiens
  source 1..20: mol_type = unassigned RNA
tgttcaccttgatatcctga

SEQ ID NO: 1185 - RNA, 20 nt, Homo sapiens
  source 1..20: mol_type = unassigned RNA
ggggttccaatactcacatg

SEQ ID NO: 1186 - RNA, 20 nt, Homo sapiens
  source 1..20: mol_type = unassigned RNA
atgaagctgcagaaccaacg

SEQ ID NO: 1187 - RNA, 20 nt, Homo sapiens
  source 1..20: mol_type = unassigned RNA
ctcctacgtttacctgtcca

SEQ ID NO: 1188 - RNA, 20 nt, Homo sapiens
  source 1..20: mol_type = unassigned RNA
agagctccaggttgatctgg

SEQ ID NO: 1189 - RNA, 20 nt, Homo sapiens
  source 1..20: mol_type = unassigned RNA
tcttgcgcaagttggtcacg

SEQ ID NO: 1190 - RNA, 20 nt, Homo sapiens
  source 1..20: mol_type = unassigned RNA
catggacaggtaaacgtagg

SEQ ID NO: 1191 - RNA, 20 nt, Homo sapiens
  source 1..20: mol_type = unassigned RNA
aagctgcagaaccaacgagg

SEQ ID NO: 1192 - RNA, 20 nt, Homo sapiens
  source 1..20: mol_type = unassigned RNA
cgcccgcgctcaccatggac

SEQ ID NO: 1193 - RNA, 20 nt, Homo sapiens
  source 1..20: mol_type = unassigned RNA
ggagagcgggctgaatgcaa

SEQ ID NO: 1194 - RNA, 20 nt, Homo sapiens
  source 1..20: mol_type = unassigned RNA
cgtgaccaacttgcgcaaga

SEQ ID NO: 1195 - RNA, 20 nt, Homo sapiens
  source 1..20: mol_type = unassigned RNA
catcaaccgccagatcaacc

SEQ ID NO: 1196 - RNA, 20 nt, Homo sapiens
  source 1..20: mol_type = unassigned RNA
tcttcaaagccacatcatcg

SEQ ID NO: 1197 - RNA, 20 nt, Homo sapiens
  source 1..20: mol_type = unassigned RNA
gcgcacctgcgaggtggacg

SEQ ID NO: 1198 - RNA, 20 nt, Homo sapiens
  source 1..20: mol_type = unassigned RNA
agcgcccgaatctggcttgg

SEQ ID NO: 1199 - RNA, 20 nt, Homo sapiens
  source 1..20: mol_type = unassigned RNA
tggcggcctctgagtcctgg

SEQ ID NO: 1200 - RNA, 20 nt, Homo sapiens
  source 1..20: mol_type = unassigned RNA
ctctttgacaagcacaccct

SEQ ID NO: 1201 - RNA, 20 nt, Homo sapiens
  source 1..20: mol_type = unassigned RNA
gttgatctggcggttgatgg

SEQ ID NO: 1202 - RNA, 20 nt, Homo sapiens
  source 1..20: mol_type = unassigned RNA
gttctggcgcacctgcgagg

SEQ ID NO: 1203 - RNA, 20 nt, Homo sapiens
  source 1..20: mol_type = unassigned RNA
tattccgccaagccagattc

SEQ ID NO: 1204 - RNA, 20 nt, Homo sapiens
  source 1..20: mol_type = unassigned RNA
aatcttccttcaggatatca

SEQ ID NO: 1205 - RNA, 20 nt, Homo sapiens
  source 1..20: mol_type = unassigned RNA
atattccgccaagccagatt

SEQ ID NO: 1206 - RNA, 20 nt, Homo sapiens
  source 1..20: mol_type = unassigned RNA
cttgaaggtgaggataacgc

SEQ ID NO: 1207 - RNA, 20 nt, Homo sapiens
  source 1..20: mol_type = unassigned RNA
agaggtgcaggccaacaatg

SEQ ID NO: 1208 - RNA, 20 nt, Homo sapiens
  source 1..20: mol_type = unassigned RNA
gacgacggctgcaaaagtgg

SEQ ID NO: 1209 - RNA, 20 nt, Homo sapiens
  source 1..20: mol_type = unassigned RNA
cttgcccccgaccgtctacg

SEQ ID NO: 1210 - RNA, 20 nt, Homo sapiens
  source 1..20: mol_type = unassigned RNA
tgcccgttcccgcctcacag

SEQ ID NO: 1211 - RNA, 20 nt, Homo sapiens
  source 1..20: mol_type = unassigned RNA
acggcctcgtagacggtcgg

SEQ ID NO: 1212 - RNA, 20 nt, Homo sapiens
  source 1..20: mol_type = unassigned RNA
aggctggaaccgcatcatcg

SEQ ID NO: 1213 - RNA, 20 nt, Homo sapiens
  source 1..20: mol_type = unassigned RNA
ctggtcctcacggaacaggg

SEQ ID NO: 1214 - RNA, 20 nt, Homo sapiens
  source 1..20: mol_type = unassigned RNA
gatctggtcctcacggaaca

SEQ ID NO: 1215 - RNA, 20 nt, Homo sapiens
  source 1..20: mol_type = unassigned RNA
tcgtggagaagcccttcggg

SEQ ID NO: 1216 - RNA, 20 nt, Homo sapiens
  source 1..20: mol_type = unassigned RNA
gatggggccgaagatcctgt

SEQ ID NO: 1217 - RNA, 20 nt, Homo sapiens
  source 1..20: mol_type = unassigned RNA
ggtgggacacacttaccaga

SEQ ID NO: 1218 - RNA, 20 nt, Homo sapiens
  source 1..20: mol_type = unassigned RNA
gtggtcctgggccagtacgt

SEQ ID NO: 1219 - RNA, 20 nt, Homo sapiens
  source 1..20: mol_type = unassigned RNA
atcgtactggccagccacat

SEQ ID NO: 1220 - RNA, 20 nt, Homo sapiens
  source 1..20: mol_type = unassigned RNA
gtggggaaccccgatggaga

SEQ ID NO: 1221 - RNA, 20 nt, Homo sapiens
  source 1..20: mol_type = unassigned RNA
ccgcgaccctcagtgccaaa

SEQ ID NO: 1222 - RNA, 20 nt, Homo sapiens
  source 1..20: mol_type = unassigned RNA
agggtacctggacgacccca

SEQ ID NO: 1223 - RNA, 20 nt, Homo sapiens
  source 1..20: mol_type = unassigned RNA
gggacacacttaccagatgg

SEQ ID NO: 1224 - RNA, 20 nt, Homo sapiens
  source 1..20: mol_type = unassigned RNA
gtggcggtggtggacccgcg

SEQ ID NO: 1225 - RNA, 20 nt, Homo sapiens
  source 1..20: mol_type = unassigned RNA
ggttctgcatcacgtccctg

SEQ ID NO: 1226 - RNA, 20 nt, Homo sapiens
  source 1..20: mol_type = unassigned RNA
gcccgaaaacaccttcatcg

SEQ ID NO: 1227 - RNA, 20 nt, Homo sapiens
  source 1..20: mol_type = unassigned RNA
tggtcctgggccagtacgtg

SEQ ID NO: 1228 - RNA, 20 nt, Homo sapiens
  source 1..20: mol_type = unassigned RNA
acggacgtcatctgagttgg

SEQ ID NO: 1229 - RNA, 20 nt, Homo sapiens
  source 1..20: mol_type = unassigned RNA
gacacagcatctgcagtagg

SEQ ID NO: 1230 - RNA, 20 nt, Homo sapiens
  source 1..20: mol_type = unassigned RNA
gggcgatgccttccatcagt

SEQ ID NO: 1231 - RNA, 20 nt, Homo sapiens
  source 1..20: mol_type = unassigned RNA
aggccaacatgcgaaaacgc

SEQ ID NO: 1232 - RNA, 20 nt, Homo sapiens
  source 1..20: mol_type = unassigned RNA
agaaatatccgacataggag

SEQ ID NO: 1233 - RNA, 20 nt, Homo sapiens
  source 1..20: mol_type = unassigned RNA
taacaagaaatatccgacat

SEQ ID NO: 1234 - RNA, 20 nt, Homo sapiens
  source 1..20: mol_type = unassigned RNA
caatgtctgacacatagcct

SEQ ID NO: 1235 - RNA, 20 nt, Homo sapiens
  source 1..20: mol_type = unassigned RNA
cgttctcaagtggggcgatg

SEQ ID NO: 1236 - RNA, 20 nt, Homo sapiens
  source 1..20: mol_type = unassigned RNA
gacagctatttatctaagtg

SEQ ID NO: 1237 - RNA, 20 nt, Homo sapiens
  source 1..20: mol_type = unassigned RNA
ggcctcaactgtattgaact

SEQ ID NO: 1238 - RNA, 20 nt, Homo sapiens
  source 1..20: mol_type = unassigned RNA
gatagaactcgggaggagcg

SEQ ID NO: 1239 - RNA, 20 nt, Homo sapiens
  source 1..20: mol_type = unassigned RNA
catctgtagatgatagaact

SEQ ID NO: 1240 - RNA, 20 nt, Homo sapiens
  source 1..20: mol_type = unassigned RNA
tgtagatgatagaactcggg

SEQ ID NO: 1241 - RNA, 20 nt, Homo sapiens
  source 1..20: mol_type = unassigned RNA
attgcccattccaaatccca

SEQ ID NO: 1242 - RNA, 20 nt, Homo sapiens
  source 1..20: mol_type = unassigned RNA
catgcgaaaacgccggaagg

SEQ ID NO: 1243 - RNA, 20 nt, Homo sapiens
  source 1..20: mol_type = unassigned RNA
ccctttggagaccagagtat

SEQ ID NO: 1244 - RNA, 20 nt, Homo sapiens
  source 1..20: mol_type = unassigned RNA
tgaaaataaaaaagtccggt

SEQ ID NO: 1245 - RNA, 20 nt, Homo sapiens
  source 1..20: mol_type = unassigned RNA
caacatgcgaaaacgccgga

SEQ ID NO: 1246 - RNA, 20 nt, Homo sapiens
  source 1..20: mol_type = unassigned RNA
tcagacattgattgtcgctg

SEQ ID NO: 1247 - RNA, 20 nt, Homo sapiens
  source 1..20: mol_type = unassigned RNA
gtccgagttcaatacagttg

SEQ ID NO: 1248 - RNA, 20 nt, Homo sapiens
  source 1..20: mol_type = unassigned RNA
gcacatctaccacgccgtca

SEQ ID NO: 1249 - RNA, 20 nt, Homo sapiens
  source 1..20: mol_type = unassigned RNA
agccatactcacctgaagcg

SEQ ID NO: 1250 - RNA, 20 nt, Homo sapiens
  source 1..20: mol_type = unassigned RNA
acctcgggcagtgtgaaccc

SEQ ID NO: 1251 - RNA, 20 nt, Homo sapiens
  source 1..20: mol_type = unassigned RNA
cagatacctttatgatcagt

SEQ ID NO: 1252 - RNA, 20 nt, Homo sapiens
  source 1..20: mol_type = unassigned RNA
gccatactcacctgaagcga

SEQ ID NO: 1253 - RNA, 20 nt, Homo sapiens
  source 1..20: mol_type = unassigned RNA
cgaggtcaaacccaacccag

SEQ ID NO: 1254 - RNA, 20 nt, Homo sapiens
  source 1..20: mol_type = unassigned RNA
tcccatactctggtctccaa

SEQ ID NO: 1255 - RNA, 20 nt, Homo sapiens
  source 1..20: mol_type = unassigned RNA
cagactcattagcatcatcc

SEQ ID NO: 1256 - RNA, 20 nt, Homo sapiens
  source 1..20: mol_type = unassigned RNA
cgtcagtacagtctacaggt

SEQ ID NO: 1257 - RNA, 20 nt, Homo sapiens
  source 1..20: mol_type = unassigned RNA
acctgtagactgtactgacg

SEQ ID NO: 1258 - RNA, 20 nt, Homo sapiens
  source 1..20: mol_type = unassigned RNA
ggtctctggaccaagaccga

SEQ ID NO: 1259 - RNA, 20 nt, Homo sapiens
  source 1..20: mol_type = unassigned RNA
gctcattctctatggcacgc

SEQ ID NO: 1260 - RNA, 20 nt, Homo sapiens
  source 1..20: mol_type = unassigned RNA
tgaggggaagagcgtgaatg

SEQ ID NO: 1261 - RNA, 20 nt, Homo sapiens
  source 1..20: mol_type = unassigned RNA
agatatcttcaaatgttcgt

SEQ ID NO: 1262 - RNA, 20 nt, Homo sapiens
  source 1..20: mol_type = unassigned RNA
aagcacgtctactgctggag

SEQ ID NO: 1263 - RNA, 20 nt, Homo sapiens
  source 1..20: mol_type = unassigned RNA
gctactgattgctcaagaga

SEQ ID NO: 1264 - RNA, 20 nt, Homo sapiens
  source 1..20: mol_type = unassigned RNA
cctctctaataatcccagca

SEQ ID NO: 1265 - RNA, 20 nt, Homo sapiens
  source 1..20: mol_type = unassigned RNA
tcagtagcaccagagcactg

SEQ ID NO: 1266 - RNA, 20 nt, Homo sapiens
  source 1..20: mol_type = unassigned RNA
gcctcgtcagtacagtctac

SEQ ID NO: 1267 - RNA, 20 nt, Homo sapiens
  source 1..20: mol_type = unassigned RNA
ccacaagcaagtcctaaaag

SEQ ID NO: 1268 - RNA, 20 nt, Homo sapiens
  source 1..20: mol_type = unassigned RNA
gagctaggggcttacctccg

SEQ ID NO: 1269 - RNA, 20 nt, Homo sapiens
  source 1..20: mol_type = unassigned RNA
gctgtggtttacttccggga

SEQ ID NO: 1270 - RNA, 20 nt, Homo sapiens
  source 1..20: mol_type = unassigned RNA
ttgaagatatctctgaaaag

SEQ ID NO: 1271 - RNA, 20 nt, Homo sapiens
  source 1..20: mol_type = unassigned RNA
ctctctaataatcccagcaa

SEQ ID NO: 1272 - RNA, 20 nt, Homo sapiens
  source 1..20: mol_type = unassigned RNA
gggcttacctccgaggaagt

SEQ ID NO: 1273 - RNA, 20 nt, Homo sapiens
  source 1..20: mol_type = unassigned RNA
gccaaagcctgggagctcta

SEQ ID NO: 1274 - RNA, 20 nt, Homo sapiens
  source 1..20: mol_type = unassigned RNA
ggaaagagtttgctccagga

SEQ ID NO: 1275 - RNA, 20 nt, Homo sapiens
  source 1..20: mol_type = unassigned RNA
gacgaggcatgtagccatcc

SEQ ID NO: 1276 - RNA, 20 nt, Homo sapiens
  source 1..20: mol_type = unassigned RNA
gaccccagctgtgcaccggt

SEQ ID NO: 1277 - RNA, 20 nt, Homo sapiens
  source 1..20: mol_type = unassigned RNA
caaatgttcgtcggatcaca

SEQ ID NO: 1278 - RNA, 20 nt, Homo sapiens
  source 1..20: mol_type = unassigned RNA
gacccaccggtgcacagctg

SEQ ID NO: 1279 - RNA, 20 nt, Homo sapiens
  source 1..20: mol_type = unassigned RNA
ccagctggctgggactaaga

SEQ ID NO: 1280 - RNA, 20 nt, Homo sapiens
  source 1..20: mol_type = unassigned RNA
gcaggccgtggaccgggccc

SEQ ID NO: 1281 - RNA, 20 nt, Homo sapiens
  source 1..20: mol_type = unassigned RNA
aagtagtaccttgccccgca

SEQ ID NO: 1282 - RNA, 20 nt, Homo sapiens
  source 1..20: mol_type = unassigned RNA
ggcgtccctctgaggcacca

SEQ ID NO: 1283 - RNA, 20 nt, Homo sapiens
  source 1..20: mol_type = unassigned RNA
catgctcttcgagaagtgcg

SEQ ID NO: 1284 - RNA, 20 nt, Homo sapiens
  source 1..20: mol_type = unassigned RNA
ctcaagtacgtccggcctgg

SEQ ID NO: 1285 - RNA, 20 nt, Homo sapiens
  source 1..20: mol_type = unassigned RNA
accaggccggacgtacttga

SEQ ID NO: 1286 - RNA, 20 nt, Homo sapiens
  source 1..20: mol_type = unassigned RNA
gaagtgcgaggtgaacggtg

SEQ ID NO: 1287 - RNA, 20 nt, Homo sapiens
  source 1..20: mol_type = unassigned RNA
ggtactacttatcgagaatg

SEQ ID NO: 1288 - RNA, 20 nt, Homo sapiens
  source 1..20: mol_type = unassigned RNA
tcccgcaggaaggcgaagag

SEQ ID NO: 1289 - RNA, 20 nt, Homo sapiens
  source 1..20: mol_type = unassigned RNA
ttcgagaagtgcgaggtgaa

SEQ ID NO: 1290 - RNA, 20 nt, Homo sapiens
  source 1..20: mol_type = unassigned RNA
caccaggccggacgtacttg

SEQ ID NO: 1291 - RNA, 20 nt, Homo sapiens
  source 1..20: mol_type = unassigned RNA
cgagaaggcatacaccgact

SEQ ID NO: 1292 - RNA, 20 nt, Homo sapiens
  source 1..20: mol_type = unassigned RNA
gctcgaacccaccaccaggc

SEQ ID NO: 1293 - RNA, 20 nt, Homo sapiens
  source 1..20: mol_type = unassigned RNA
cccggaccgtggtgcctcag

SEQ ID NO: 1294 - RNA, 20 nt, Homo sapiens
  source 1..20: mol_type = unassigned RNA
tgaattccctcaagtacgtc

SEQ ID NO: 1295 - RNA, 20 nt, Homo sapiens
  source 1..20: mol_type = unassigned RNA
gagaatgtggcgtccctctg

SEQ ID NO: 1296 - RNA, 20 nt, Homo sapiens
  source 1..20: mol_type = unassigned RNA
tccctcaagtacgtccggcc

SEQ ID NO: 1297 - RNA, 20 nt, Homo sapiens
  source 1..20: mol_type = unassigned RNA
accctctcttcgccttcctg

SEQ ID NO: 1298 - RNA, 20 nt, Homo sapiens
  source 1..20: mol_type = unassigned RNA
gtgagcctgggctccctgcg

SEQ ID NO: 1299 - RNA, 20 nt, Homo sapiens
  source 1..20: mol_type = unassigned RNA
ccggaccgtggtgcctcaga

SEQ ID NO: 1300 - RNA, 20 nt, Homo sapiens
  source 1..20: mol_type = other RNA
cccgcaggaaggcgaagaga

SEQ ID NO: 1301 - RNA, 20 nt, Homo sapiens
  source 1..20: mol_type = unassigned RNA
gatgcccaaactggttgcac

SEQ ID NO: 1302 - RNA, 20 nt, Homo sapiens
  source 1..20: mol_type = unassigned RNA
ggcgcacctgatgcccaaac

SEQ ID NO: 1303 - RNA, 20 nt, Homo sapiens
  source 1..20: mol_type = unassigned RNA
cccagatgaacgagctgcag

SEQ ID NO: 1304 - RNA, 20 nt, Homo sapiens
  source 1..20: mol_type = unassigned RNA
attcagaatctcttcgttct

SEQ ID NO: 1305 - RNA, 20 nt, Homo sapiens
  source 1..20: mol_type = unassigned RNA
tcggcgcgcccgctggccgg

SEQ ID NO: 1306 - RNA, 20 nt, Homo sapiens
  source 1..20: mol_type = unassigned RNA
gtagatttcaatacgttccg

SEQ ID NO: 1307 - RNA, 20 nt, Homo sapiens
  source 1..20: mol_type = unassigned RNA
gctctgaggcacaaccaccc

SEQ ID NO: 1308 - RNA, 20 nt, Homo sapiens
  source 1..20: mol_type = unassigned RNA
gatgtccaaattggttgcaa

SEQ ID NO: 1309 - RNA, 20 nt, Homo sapiens
  source 1..20: mol_type = unassigned RNA
ctcaagtatgtccgtcctgg

SEQ ID NO: 1310 - RNA, 20 nt, Homo sapiens
  source 1..20: mol_type = unassigned RNA
tccttcaggtaggcgaagac

SEQ ID NO: 1311 - RNA, 20 nt, Homo sapiens
  source 1..20: mol_type = unassigned RNA
gctggtatccacccccagga

SEQ ID NO: 1312 - RNA, 20 nt, Homo sapiens
  source 1..20: mol_type = unassigned RNA
cacccttgtccaaaaatgtg

SEQ ID NO: 1313 - RNA, 20 nt, Homo sapiens
  source 1..20: mol_type = unassigned RNA
ctaggagaactgtcagaatg

SEQ ID NO: 1314 - RNA, 20 nt, Homo sapiens
  source 1..20: mol_type = unassigned RNA
gagaatgtggcttcgctctg

SEQ ID NO: 1315 - RNA, 20 nt, Homo sapiens
  source 1..20: mol_type = unassigned RNA
accaatttggacatcaggtg

SEQ ID NO: 1316 - RNA, 20 nt, Homo sapiens
  source 1..20: mol_type = unassigned RNA
agccacattctcaatcagca

SEQ ID NO: 1317 - RNA, 20 nt, Homo sapiens
  source 1..20: mol_type = unassigned RNA
ggccgtgctgattgagaatg

SEQ ID NO: 1318 - RNA, 20 nt, Homo sapiens
  source 1..20: mol_type = unassigned RNA
gagctgggtgaagtcccggg

SEQ ID NO: 1319 - RNA, 20 nt, Homo sapiens
  source 1..20: mol_type = unassigned RNA
gtccaaaaatgtgaggtgaa

SEQ ID NO: 1320 - RNA, 20 nt, Homo sapiens
  source 1..20: mol_type = unassigned RNA
tttcaatacgttccggggca

SEQ ID NO: 1321 - RNA, 20 nt, Homo sapiens
  source 1..20: mol_type = unassigned RNA
tcattctgacagttctccta

SEQ ID NO: 1322 - RNA, 20 nt, Homo sapiens
  source 1..20: mol_type = unassigned RNA
ggacatacttgagactgttc

SEQ ID NO: 1323 - RNA, 20 nt, Homo sapiens
  source 1..20: mol_type = unassigned RNA
aggtagatttcaatacgttc

SEQ ID NO: 1324 - RNA, 20 nt, Homo sapiens
  source 1..20: mol_type = unassigned RNA
ggggagcttgtccttcaggt

SEQ ID NO: 1325 - RNA, 20 nt, Homo sapiens
  source 1..20: mol_type = unassigned RNA
tcctgtcttcgcctacctga

SEQ ID NO: 1326 - RNA, 20 nt, Homo sapiens
  source 1..20: mol_type = unassigned RNA
catccaggctgatggcactg

SEQ ID NO: 1327 - RNA, 20 nt, Homo sapiens
  source 1..20: mol_type = unassigned RNA
gcattgcagctcgttgagct

SEQ ID NO: 1328 - RNA, 20 nt, Homo sapiens
  source 1..20: mol_type = unassigned RNA
ggtagatttcaatacgttcc

SEQ ID NO: 1329 - RNA, 20 nt, Homo sapiens
  source 1..20: mol_type = unassigned RNA
ctcattctgacagttctcct

SEQ ID NO: 1330 - RNA, 20 nt, Homo sapiens
  source 1..20: mol_type = unassigned RNA
agctgcaatgccgctttccc

SEQ ID NO: 1331 - RNA, 20 nt, Homo sapiens
  source 1..20: mol_type = unassigned RNA
ccggggacaagagaagtcga

SEQ ID NO: 1332 - RNA, 20 nt, Homo sapiens
  source 1..20: mol_type = unassigned RNA
gctgagtgagtactcacttg

SEQ ID NO: 1333 - RNA, 20 nt, Homo sapiens
  source 1..20: mol_type = unassigned RNA
gtgagtactcacttgagggt

SEQ ID NO: 1334 - RNA, 20 nt, Homo sapiens
  source 1..20: mol_type = unassigned RNA
cccagaatgaccagaccgaa

SEQ ID NO: 1335 - RNA, 20 nt, Homo sapiens
  source 1..20: mol_type = unassigned RNA
gtgggctcttaccaatgtac

SEQ ID NO: 1336 - RNA, 20 nt, Homo sapiens
  source 1..20: mol_type = unassigned RNA
aacaggtatgtccgaccagg

SEQ ID NO: 1337 - RNA, 20 nt, Homo sapiens
  source 1..20: mol_type = unassigned RNA
atacgtcctctttgtcaacg

SEQ ID NO: 1338 - RNA, 20 nt, Homo sapiens
  source 1..20: mol_type = unassigned RNA
cggagccctcaccattgatg

SEQ ID NO: 1339 - RNA, 20 nt, Homo sapiens
  source 1..20: mol_type = unassigned RNA
agtggcaccatttacgagta

SEQ ID NO: 1340 - RNA, 20 nt, Homo sapiens
  source 1..20: mol_type = unassigned RNA
ttccagatggactgccatgg

SEQ ID NO: 1341 - RNA, 20 nt, Homo sapiens
  source 1..20: mol_type = unassigned RNA
tggtgccacttatgccacca

SEQ ID NO: 1342 - RNA, 20 nt, Homo sapiens
  source 1..20: mol_type = unassigned RNA
aggtatgtccgaccaggtgg

SEQ ID NO: 1343 - RNA, 20 nt, Homo sapiens
  source 1..20: mol_type = unassigned RNA
ctcaacaggtatgtccgacc

SEQ ID NO: 1344 - RNA, 20 nt, Homo sapiens
  source 1..20: mol_type = unassigned RNA
caggaagagcttgcaccatt

SEQ ID NO: 1345 - RNA, 20 nt, Homo sapiens
  source 1..20: mol_type = unassigned RNA
ccttcgacttctcttgtccc

SEQ ID NO: 1346 - RNA, 20 nt, Homo sapiens
  source 1..20: mol_type = unassigned RNA
agagcttgcaccattcggtc

SEQ ID NO: 1347 - RNA, 20 nt, Homo sapiens
  source 1..20: mol_type = unassigned RNA
atccccttcaagcagtatgc

SEQ ID NO: 1348 - RNA, 20 nt, Homo sapiens
  source 1..20: mol_type = unassigned RNA
agccctcaccattgatgggg

SEQ ID NO: 1349 - RNA, 20 nt, Homo sapiens
  source 1..20: mol_type = unassigned RNA
ggacaaagcctccacctggt

SEQ ID NO: 1350 - RNA, 20 nt, Homo sapiens
  source 1..20: mol_type = unassigned RNA
gccagctactgaggcctgac

SEQ ID NO: 1351 - RNA, 20 nt, Homo sapiens
  source 1..20: mol_type = unassigned RNA
gtgttccagatggactgcca

SEQ ID NO: 1352 - RNA, 20 nt, Homo sapiens
  source 1..20: mol_type = unassigned RNA
agctggccacgttgacaaag

SEQ ID NO: 1353 - RNA, 20 nt, Homo sapiens
  source 1..20: mol_type = unassigned RNA
tttgagaaaggggatgtcaa

SEQ ID NO: 1354 - RNA, 20 nt, Homo sapiens
  source 1..20: mol_type = unassigned RNA
caatttggaaaacaggaacc

SEQ ID NO: 1355 - RNA, 20 nt, Homo sapiens
  source 1..20: mol_type = other RNA
gacgaagccggccaggagca

SEQ ID NO: 1356 - RNA, 20 nt, Homo sapiens
  source 1..20: mol_type = unassigned RNA
gaatttgacgttgtagcccg

SEQ ID NO: 1357 - RNA, 20 nt, Homo sapiens
  source 1..20: mol_type = unassigned RNA
ttaacctggacaagtaccgg

SEQ ID NO: 1358 - RNA, 20 nt, Homo sapiens
  source 1..20: mol_type = unassigned RNA
gagatcaaagagttcgccgc

SEQ ID NO: 1359 - RNA, 20 nt, Homo sapiens
  source 1..20: mol_type = unassigned RNA
gcaaaccacactcagcgtat

SEQ ID NO: 1360 - RNA, 20 nt, Homo sapiens
  source 1..20: mol_type = unassigned RNA
agagatcaaagagttcgccg

SEQ ID NO: 1361 - RNA, 20 nt, Homo sapiens
  source 1..20: mol_type = unassigned RNA
ttcggtcttgcctcactggg

SEQ ID NO: 1362 - RNA, 20 nt, Homo sapiens
  source 1..20: mol_type = unassigned RNA
cttggcggaaaactcgtgca

SEQ ID NO: 1363 - RNA, 20 nt, Homo sapiens
  source 1..20: mol_type = unassigned RNA
cgtgtgcatcgtcaccaacg

SEQ ID NO: 1364 - RNA, 20 nt, Homo sapiens
  source 1..20: mol_type = unassigned RNA
gcttcccgaactggttacac

SEQ ID NO: 1365 - RNA, 20 nt, Homo sapiens
  source 1..20: mol_type = unassigned RNA
taacctggacaagtaccggt

SEQ ID NO: 1366 - RNA, 20 nt, Homo sapiens
  source 1..20: mol_type = unassigned RNA
tttccgccaaggacatcgac

SEQ ID NO: 1367 - RNA, 20 nt, Homo sapiens
  source 1..20: mol_type = unassigned RNA
cacgcccgatacgctgagtg

SEQ ID NO: 1368 - RNA, 20 nt, Homo sapiens
  source 1..20: mol_type = unassigned RNA
gagctgagtgtagtttactt

SEQ ID NO: 1369 - RNA, 20 nt, Homo sapiens
  source 1..20: mol_type = unassigned RNA
cgcacagcgccagtcgtccc

SEQ ID NO: 1370 - RNA, 20 nt, Homo sapiens
  source 1..20: mol_type = unassigned RNA
cccgaactggttacacggga

SEQ ID NO: 1371 - RNA, 20 nt, Homo sapiens
  source 1..20: mol_type = unassigned RNA
gatacgctgagtgtggtttg

SEQ ID NO: 1372 - RNA, 20 nt, Homo sapiens
  source 1..20: mol_type = unassigned RNA
cctttgccgcctactgaagc

SEQ ID NO: 1373 - RNA, 20 nt, Homo sapiens
  source 1..20: mol_type = unassigned RNA
gtgtaaccagttcgggaagc

SEQ ID NO: 1374 - RNA, 20 nt, Homo sapiens
  source 1..20: mol_type = unassigned RNA
caaggacatcgacgggcaca

SEQ ID NO: 1375 - RNA, 20 nt, Homo sapiens
  source 1..20: mol_type = unassigned RNA
gtgcccgtcgatgtccttgg

SEQ ID NO: 1376 - RNA, 20 nt, Homo sapiens
  source 1..20: mol_type = unassigned RNA
aaccagttcgggaagcaggt

SEQ ID NO: 1377 - RNA, 20 nt, Homo sapiens
  source 1..20: mol_type = unassigned RNA
cgacgggcacatggttaacc

SEQ ID NO: 1378 - RNA, 20 nt, Homo sapiens
  source 1..20: mol_type = unassigned RNA
ctgaagccggcgctgctctg

SEQ ID NO: 1379 - RNA, 20 nt, Homo sapiens
  source 1..20: mol_type = unassigned RNA
caaaccacactcagcgtatc

SEQ ID NO: 1380 - RNA, 20 nt, Homo sapiens
  source 1..20: mol_type = unassigned RNA
gcgctagctcaccatggtcc

SEQ ID NO: 1381 - RNA, 20 nt, Homo sapiens
  source 1..20: mol_type = unassigned RNA
ttgcgctgtcagaccacagt

SEQ ID NO: 1382 - RNA, 20 nt, Homo sapiens
  source 1..20: mol_type = unassigned RNA
gcccaacacaactagaccat

SEQ ID NO: 1383 - RNA, 20 nt, Homo sapiens
  source 1..20: mol_type = unassigned RNA
cgctgtcagaccacagtagg

SEQ ID NO: 1384 - RNA, 20 nt, Homo sapiens
  source 1..20: mol_type = unassigned RNA
tgcaggtatgtccgtccagg

SEQ ID NO: 1385 - RNA, 20 nt, Homo sapiens
  source 1..20: mol_type = unassigned RNA
tgtgcaaacaagtcccaagc

SEQ ID NO: 1386 - RNA, 20 nt, Homo sapiens
  source 1..20: mol_type = unassigned RNA
gattgccacaaagacgagaa

SEQ ID NO: 1387 - RNA, 20 nt, Homo sapiens
  source 1..20: mol_type = unassigned RNA
ttgcaggtatgtccgtccag

SEQ ID NO: 1388 - RNA, 20 nt, Homo sapiens
  source 1..20: mol_type = unassigned RNA
agaactaaatgcactccagg

SEQ ID NO: 1389 - RNA, 20 nt, Homo sapiens
  source 1..20: mol_type = unassigned RNA
cccaacacaactagaccata

SEQ ID NO: 1390 - RNA, 20 nt, Homo sapiens
  source 1..20: mol_type = unassigned RNA
ctaggtacaaatcctccccc

SEQ ID NO: 1391 - RNA, 20 nt, Homo sapiens
  source 1..20: mol_type = unassigned RNA
aggcaccatctatgactatg

SEQ ID NO: 1392 - RNA, 20 nt, Homo sapiens
  source 1..20: mol_type = unassigned RNA
gcacaaagcaggctaggaga

SEQ ID NO: 1393 - RNA, 20 nt, Homo sapiens
  source 1..20: mol_type = unassigned RNA
tgtttccttcaagcagtatg

SEQ ID NO: 1394 - RNA, 20 nt, Homo sapiens
  source 1..20: mol_type = unassigned RNA
gcacatcctcttcgtcaacg

SEQ ID NO: 1395 - RNA, 20 nt, Homo sapiens
  source 1..20: mol_type = unassigned RNA
aggtggccacgttgacgaag

SEQ ID NO: 1396 - RNA, 20 nt, Homo sapiens
  source 1..20: mol_type = unassigned RNA
gaagacacgtacttgagccc

SEQ ID NO: 1397 - RNA, 20 nt, Homo sapiens
  source 1..20: mol_type = unassigned RNA
gccctatggtctagttgtgt

SEQ ID NO: 1398 - RNA, 20 nt, Homo sapiens
  source 1..20: mol_type = unassigned RNA
ttcattcttattaagtgcga

SEQ ID NO: 1399 - RNA, 20 nt, Homo sapiens
  source 1..20: mol_type = unassigned RNA
ataacaaagagattcttcct

SEQ ID NO: 1400 - RNA, 20 nt, Homo sapiens
  source 1..20: mol_type = unassigned RNA
caatttggaaagcaagaacc

SEQ ID NO: 1401 - RNA, 20 nt, Homo sapiens
  source 1..20: mol_type = unassigned RNA
gggacttgtttgcacaaagc

SEQ ID NO: 1402 - RNA, 20 nt, Homo sapiens
  source 1..20: mol_type = unassigned RNA
gtacaaatcctccccctgga

SEQ ID NO: 1403 - RNA, 20 nt, Homo sapiens
  source 1..20: mol_type = unassigned RNA
ttctcaaaaagctggaaact

SEQ ID NO: 1404 - RNA, 20 nt, Homo sapiens
  source 1..20: mol_type = unassigned RNA
ggtctgacagcgcaatatcc

SEQ ID NO: 1405 - RNA, 20 nt, Homo sapiens
  source 1..20: mol_type = unassigned RNA
tttgagaaaggggatgtgaa

SEQ ID NO: 1406 - RNA, 20 nt, Homo sapiens
  source 1..20: mol_type = unassigned RNA
tgtggccgcctattgaggct

SEQ ID NO: 1407 - RNA, 20 nt, Homo sapiens
  source 1..20: mol_type = unassigned RNA
ttccaggtggattgcaacaa

SEQ ID NO: 1408 - RNA, 20 nt, Homo sapiens
  source 1..20: mol_type = unassigned RNA
agctgccaagcctcaatagg

SEQ ID NO: 1409 - RNA, 20 nt, Homo sapiens
  source 1..20: mol_type = unassigned RNA
agaactgaatgcactacagg

SEQ ID NO: 1410 - RNA, 20 nt, Homo sapiens
  source 1..20: mol_type = unassigned RNA
ctggggacaaagccactacc

SEQ ID NO: 1411 - RNA, 20 nt, Homo sapiens
  source 1..20: mol_type = unassigned RNA
ccaggtggattgcaacaaag

SEQ ID NO: 1412 - RNA, 20 nt, Homo sapiens
  source 1..20: mol_type = unassigned RNA
ggatgtactcctcgccgttg

SEQ ID NO: 1413 - RNA, 20 nt, Homo sapiens
  source 1..20: mol_type = unassigned RNA
gcacgtcctgtttgtcaatg

SEQ ID NO: 1414 - RNA, 20 nt, Homo sapiens
  source 1..20: mol_type = unassigned RNA
aggtatgtgtgtccaggtag

SEQ ID NO: 1415 - RNA, 20 nt, Homo sapiens
  source 1..20: mol_type = unassigned RNA
tctgctgagcaaagccaacc

SEQ ID NO: 1416 - RNA, 20 nt, Homo sapiens
  source 1..20: mol_type = unassigned RNA
gagggctccatactcataga

SEQ ID NO: 1417 - RNA, 20 nt, Homo sapiens
  source 1..20: mol_type = unassigned RNA
acaggcaccatctatgagta

SEQ ID NO: 1418 - RNA, 20 nt, Homo sapiens
  source 1..20: mol_type = unassigned RNA
agccctcaccctcaacggcg

SEQ ID NO: 1419 - RNA, 20 nt, Homo sapiens
  source 1..20: mol_type = unassigned RNA
acaaactcagaaatacttct

SEQ ID NO: 1420 - RNA, 20 nt, Homo sapiens
  source 1..20: mol_type = unassigned RNA
tatggagccctcaccctcaa

SEQ ID NO: 1421 - RNA, 20 nt, Homo sapiens
  source 1..20: mol_type = unassigned RNA
ggcttggcagctcagtatcc

SEQ ID NO: 1422 - RNA, 20 nt, Homo sapiens
  source 1..20: mol_type = unassigned RNA
cccctttgttgcaatccacc

SEQ ID NO: 1423 - RNA, 20 nt, Homo sapiens
  source 1..20: mol_type = unassigned RNA
cctaaagcctcaaaatagga

SEQ ID NO: 1424 - RNA, 20 nt, Homo sapiens
  source 1..20: mol_type = unassigned RNA
aggcggccacattgacaaac

SEQ ID NO: 1425 - RNA, 20 nt, Homo sapiens
  source 1..20: mol_type = unassigned RNA
gatgtactcctcgccgttga

SEQ ID NO: 1426 - RNA, 20 nt, Homo sapiens
  source 1..20: mol_type = unassigned RNA
gtcaatgtggccgcctattg

SEQ ID NO: 1427 - RNA, 20 nt, Homo sapiens
  source 1..20: mol_type = unassigned RNA
cactgcaggtatgtgtgtcc

SEQ ID NO: 1428 - RNA, 20 nt, Homo sapiens
  source 1..20: mol_type = unassigned RNA
tgcctgcaaactgcttgaat

SEQ ID NO: 1429 - RNA, 20 nt, Homo sapiens
  source 1..20: mol_type = unassigned RNA
agtatttctgagtttgttcc

SEQ ID NO: 1430 - RNA, 20 nt, Homo sapiens
  source 1..20: mol_type = unassigned RNA
tttgagaaaggggatgtgaa

SEQ ID NO: 1431 - RNA, 20 nt, Homo sapiens
  source 1..20: mol_type = unassigned RNA
gtgtcgctggagaagtaccg

SEQ ID NO: 1432 - RNA, 20 nt, Homo sapiens
  source 1..20: mol_type = unassigned RNA
cccgcgcactcaccgatccg

SEQ ID NO: 1433 - RNA, 20 nt, Homo sapiens
  source 1..20: mol_type = unassigned RNA
gctggagaagtaccgcggat

SEQ ID NO: 1434 - RNA, 20 nt, Homo sapiens
  source 1..20: mol_type = unassigned RNA
ttcaaggcggtcaacatccg

SEQ ID NO: 1435 - RNA, 20 nt, Homo sapiens
  source 1..20: mol_type = unassigned RNA
ctgcaatcttgctaaacatg

SEQ ID NO: 1436 - RNA, 20 nt, Homo sapiens
  source 1..20: mol_type = unassigned RNA
gtgaatgtggccagcgagtg

SEQ ID NO: 1437 - RNA, 20 nt, Homo sapiens
  source 1..20: mol_type = unassigned RNA
ggaatgagacactgtaggtg

SEQ ID NO: 1438 - RNA, 20 nt, Homo sapiens
  source 1..20: mol_type = unassigned RNA
cgagcacgttaaagtggtgg

SEQ ID NO: 1439 - RNA, 20 nt, Homo sapiens
  source 1..20: mol_type = unassigned RNA
actgcaatcttgctaaacat

SEQ ID NO: 1440 - RNA, 20 nt, Homo sapiens
  source 1..20: mol_type = unassigned RNA
gcgagcacgttaaagtggtg

SEQ ID NO: 1441 - RNA, 20 nt, Homo sapiens
  source 1..20: mol_type = unassigned RNA
acaggagcctgacagcaaca

SEQ ID NO: 1442 - RNA, 20 nt, Homo sapiens
  source 1..20: mol_type = unassigned RNA
aagattgcagtcaccggtac

SEQ ID NO: 1443 - RNA, 20 nt, Homo sapiens
  source 1..20: mol_type = unassigned RNA
ggaaggcgagcacgttaaag

SEQ ID NO: 1444 - RNA, 20 nt, Homo sapiens
  source 1..20: mol_type = unassigned RNA
ggacttctacgacttcaagg

SEQ ID NO: 1445 - RNA, 20 nt, Homo sapiens
  source 1..20: mol_type = unassigned RNA
ccagcgacaccagtttgccc

SEQ ID NO: 1446 - RNA, 20 nt, Homo sapiens
  source 1..20: mol_type = unassigned RNA
ggcgagcacgttaaagtggt

SEQ ID NO: 1447 - RNA, 20 nt, Homo sapiens
  source 1..20: mol_type = unassigned RNA
gttggccaaactggttgcag

SEQ ID NO: 1448 - RNA, 20 nt, Homo sapiens
  source 1..20: mol_type = unassigned RNA
tgtcatacaggtgtccctgg

SEQ ID NO: 1449 - RNA, 20 nt, Homo sapiens
  source 1..20: mol_type = unassigned RNA
gactgcaatcttgctaaaca

SEQ ID NO: 1450 - RNA, 20 nt, Homo sapiens
  source 1..20: mol_type = unassigned RNA
aggcgagcacgttaaagtgg

SEQ ID NO: 1451 - RNA, 20 nt, Homo sapiens
  source 1..20: mol_type = unassigned RNA
gctggccacattcaccacca

SEQ ID NO: 1452 - RNA, 20 nt, Homo sapiens
  source 1..20: mol_type = unassigned RNA
tttagcaagattgcagtcac

SEQ ID NO: 1453 - RNA, 20 nt, Homo sapiens
  source 1..20: mol_type = other RNA
gcgcgcaggccgcagcccac

SEQ ID NO: 1454 - RNA, 20 nt, Homo sapiens
  source 1..20: mol_type = unassigned RNA
gctgcagctgctgcagggct

SEQ ID NO: 1455 - RNA, 20 nt, Homo sapiens
  source 1..20: mol_type = unassigned RNA
ctgttggccaaactggttgc

SEQ ID NO: 1456 - RNA, 20 nt, Homo sapiens
  source 1..20: mol_type = unassigned RNA
aaaagccaacacgctgaagt

SEQ ID NO: 1457 - RNA, 20 nt, Homo sapiens
  source 1..20: mol_type = unassigned RNA
ggtttcactagttgtaaacg

SEQ ID NO: 1458 - RNA, 20 nt, Homo sapiens
  source 1..20: mol_type = unassigned RNA
actgcaaatacctttgctct

SEQ ID NO: 1459 - RNA, 20 nt, Homo sapiens
  source 1..20: mol_type = unassigned RNA
tctacttccttgcttgggcg

SEQ ID NO: 1460 - RNA, 20 nt, Homo sapiens
  source 1..20: mol_type = unassigned RNA
tttgaagtgaaggatgcaaa

SEQ ID NO: 1461 - RNA, 20 nt, Homo sapiens
  source 1..20: mol_type = unassigned RNA
tcacagacagaaattactta

SEQ ID NO: 1462 - RNA, 20 nt, Homo sapiens
  source 1..20: mol_type = unassigned RNA
gccaacacgctgaagtggga

SEQ ID NO: 1463 - RNA, 20 nt, Homo sapiens
  source 1..20: mol_type = unassigned RNA
aaggaactgcacaaagagtt

SEQ ID NO: 1464 - RNA, 20 nt, Homo sapiens
  source 1..20: mol_type = unassigned RNA
atgttccgggcccagagcaa

SEQ ID NO: 1465 - RNA, 20 nt, Homo sapiens
  source 1..20: mol_type = unassigned RNA
aaagattctacttccttgct

SEQ ID NO: 1466 - RNA, 20 nt, Homo sapiens
  source 1..20: mol_type = unassigned RNA
ctcacagacagaaattactt

SEQ ID NO: 1467 - RNA, 20 nt, Homo sapiens
  source 1..20: mol_type = unassigned RNA
gcttacccgctaaaatgttc

SEQ ID NO: 1468 - RNA, 20 nt, Homo sapiens
  source 1..20: mol_type = unassigned RNA
accatcccacttcagcgtgt

SEQ ID NO: 1469 - RNA, 20 nt, Homo sapiens
  source 1..20: mol_type = unassigned RNA
tcttaatcttgtggaagatg

SEQ ID NO: 1470 - RNA, 20 nt, Homo sapiens
  source 1..20: mol_type = unassigned RNA
gattctccaaactgattgca

SEQ ID NO: 1471 - RNA, 20 nt, Homo sapiens
  source 1..20: mol_type = unassigned RNA
aaatacctttgctctgggcc

SEQ ID NO: 1472 - RNA, 20 nt, Homo sapiens
  source 1..20: mol_type = unassigned RNA
atcggagccccgcccaagca

SEQ ID NO: 1473 - RNA, 20 nt, Homo sapiens
  source 1..20: mol_type = unassigned RNA
aactgcaaatacctttgctc

SEQ ID NO: 1474 - RNA, 20 nt, Homo sapiens
  source 1..20: mol_type = unassigned RNA
attctacttccttgcttggg

SEQ ID NO: 1475 - RNA, 20 nt, Homo sapiens
  source 1..20: mol_type = unassigned RNA
cgattctccaaactgattgc

SEQ ID NO: 1476 - RNA, 20 nt, Homo sapiens
  source 1..20: mol_type = unassigned RNA
gtttctctggaaaagtataa

SEQ ID NO: 1477 - RNA, 20 nt, Homo sapiens
  source 1..20: mol_type = unassigned RNA
atcttaatcttgtggaagat

SEQ ID NO: 1478 - RNA, 20 nt, Homo sapiens
  source 1..20: mol_type = unassigned RNA
gtctgtgagttggcagtcac

SEQ ID NO: 1479 - RNA, 20 nt, Homo sapiens
  source 1..20: mol_type = unassigned RNA
gaaaagccaacacgctgaag

SEQ ID NO: 1480 - RNA, 20 nt, Homo sapiens
  source 1..20: mol_type = unassigned RNA
cagaaattacttagggctga

SEQ ID NO: 1481 - RNA, 20 nt, Homo sapiens
  source 1..20: mol_type = unassigned RNA
ggcattcaggcggctcacat

SEQ ID NO: 1482 - RNA, 20 nt, Homo sapiens
  source 1..20: mol_type = unassigned RNA
gggcttgggatcactcgtga

SEQ ID NO: 1483 - RNA, 20 nt, Homo sapiens
  source 1..20: mol_type = unassigned RNA
tgggcgggtcccgaatacca

SEQ ID NO: 1484 - RNA, 20 nt, Homo sapiens
  source 1..20: mol_type = unassigned RNA
tatttgccaataggtcaagg

SEQ ID NO: 1485 - RNA, 20 nt, Homo sapiens
  source 1..20: mol_type = unassigned RNA
tcccatatagaaatcatccg

SEQ ID NO: 1486 - RNA, 20 nt, Homo sapiens
  source 1..20: mol_type = unassigned RNA
ctatcaaaacaatctcacca

SEQ ID NO: 1487 - RNA, 20 nt, Homo sapiens
  source 1..20: mol_type = unassigned RNA
tgatcccaagcccacaatag

SEQ ID NO: 1488 - RNA, 20 nt, Homo sapiens
  source 1..20: mol_type = unassigned RNA
ggtattcgggacccgcccaa

SEQ ID NO: 1489 - RNA, 20 nt, Homo sapiens
  source 1..20: mol_type = unassigned RNA
tggttactgcagttcccggt

SEQ ID NO: 1490 - RNA, 20 nt, Homo sapiens
  source 1..20: mol_type = unassigned RNA
ccacacatcctgatcgccac

SEQ ID NO: 1491 - RNA, 20 nt, Homo sapiens
  source 1..20: mol_type = unassigned RNA
gtcatgactggtagcctacc

SEQ ID NO: 1492 - RNA, 20 nt, Homo sapiens
  source 1..20: mol_type = unassigned RNA
cacatcctgatcgccacagg

SEQ ID NO: 1493 - RNA, 20 nt, Homo sapiens
  source 1..20: mol_type = unassigned RNA
aagcccacaatagaggtcag

SEQ ID NO: 1494 - RNA, 20 nt, Homo sapiens
  source 1..20: mol_type = unassigned RNA
tcagtgatgtcttagaaccc

SEQ ID NO: 1495 - RNA, 20 nt, Homo sapiens
  source 1..20: mol_type = unassigned RNA
gatcaccaggtagtcatagg

SEQ ID NO: 1496 - RNA, 20 nt, Homo sapiens
  source 1..20: mol_type = unassigned RNA
gtgagggtaaattcaattgg

SEQ ID NO: 1497 - RNA, 20 nt, Homo sapiens
  source 1..20: mol_type = unassigned RNA
gatcatgcatgaattcagag

SEQ ID NO: 1498 - RNA, 20 nt, Homo sapiens
  source 1..20: mol_type = unassigned RNA
tctggaatcatggtcatgac

SEQ ID NO: 1499 - RNA, 20 nt, Homo sapiens
  source 1..20: mol_type = unassigned RNA
agcttaggaataaccagcga

SEQ ID NO: 1500 - RNA, 20 nt, Homo sapiens
  source 1..20: mol_type = unassigned RNA
ggggatctggctctcatgag

SEQ ID NO: 1501 - RNA, 20 nt, Homo sapiens
  source 1..20: mol_type = unassigned RNA
ggtcatgactggtagcctac

SEQ ID NO: 1502 - RNA, 20 nt, Homo sapiens
  source 1..20: mol_type = unassigned RNA
tatggctttccaagttgtga

SEQ ID NO: 1503 - RNA, 20 nt, Homo sapiens
  source 1..20: mol_type = unassigned RNA
agcccacaatagaggtcagt

SEQ ID NO: 1504 - RNA, 20 nt, Homo sapiens
  source 1..20: mol_type = unassigned RNA
cttgtggctctccaccacgg

SEQ ID NO: 1505 - RNA, 20 nt, Homo sapiens
  source 1..20: mol_type = unassigned RNA
acgggagagggcgcgcgtga

SEQ ID NO: 1506 - RNA, 20 nt, Homo sapiens
  source 1..20: mol_type = unassigned RNA
aagttctgtgagacaaccat

SEQ ID NO: 1507 - RNA, 20 nt, Homo sapiens
  source 1..20: mol_type = unassigned RNA
tcagccatcgccaagatcgt

SEQ ID NO: 1508 - RNA, 20 nt, Homo sapiens
  source 1..20: mol_type = unassigned RNA
ttgacccacgggtgaccatg

SEQ ID NO: 1509 - RNA, 20 nt, Homo sapiens
  source 1..20: mol_type = unassigned RNA
ccgtatcacagtggtgcaag

SEQ ID NO: 1510 - RNA, 20 nt, Homo sapiens
  source 1..20: mol_type = unassigned RNA
tgacccacgggtgaccatgt

SEQ ID NO: 1511 - RNA, 20 nt, Homo sapiens
  source 1..20: mol_type = unassigned RNA
aatacccacatggtcacccg

SEQ ID NO: 1512 - RNA, 20 nt, Homo sapiens
  source 1..20: mol_type = unassigned RNA
atcttgccgatgaactgatg

SEQ ID NO: 1513 - RNA, 20 nt, Homo sapiens
  source 1..20: mol_type = unassigned RNA
gccatcgccaagatcgtggg

SEQ ID NO: 1514 - RNA, 20 nt, Homo sapiens
  source 1..20: mol_type = unassigned RNA
gatcttgccgatgaactgat

SEQ ID NO: 1515 - RNA, 20 nt, Homo sapiens
  source 1..20: mol_type = unassigned RNA
gtggacacagtagagatctg

SEQ ID NO: 1516 - RNA, 20 nt, Homo sapiens
  source 1..20: mol_type = unassigned RNA
gcacaagttgcccccaaatg

SEQ ID NO: 1517 - RNA, 20 nt, Homo sapiens
  source 1..20: mol_type = unassigned RNA
accaaacttccgtatcacag

SEQ ID NO: 1518 - RNA, 20 nt, Homo sapiens
  source 1..20: mol_type = unassigned RNA
agctggcacagtttgaccca

SEQ ID NO: 1519 - RNA, 20 nt, Homo sapiens
  source 1..20: mol_type = unassigned RNA
atacccacatggtcacccgt

SEQ ID NO: 1520 - RNA, 20 nt, Homo sapiens
  source 1..20: mol_type = unassigned RNA
tcaagaatgtagtggccgtg

SEQ ID NO: 1521 - RNA, 20 nt, Homo sapiens
  source 1..20: mol_type = unassigned RNA
cctcttgcaccactgtgata

SEQ ID NO: 1522 - RNA, 20 nt, Homo sapiens
  source 1..20: mol_type = unassigned RNA
gatggggcaccacaaagatc

SEQ ID NO: 1523 - RNA, 20 nt, Homo sapiens
  source 1..20: mol_type = unassigned RNA
gggggccaacattgccagcg

SEQ ID NO: 1524 - RNA, 20 nt, Homo sapiens
  source 1..20: mol_type = unassigned RNA
agatgagcttcagcccattg

SEQ ID NO: 1525 - RNA, 20 nt, Homo sapiens
  source 1..20: mol_type = unassigned RNA
aagatctgtgaccagctcaa

SEQ ID NO: 1526 - RNA, 20 nt, Homo sapiens
  source 1..20: mol_type = unassigned RNA
ctttggcgacaacaccaagg

SEQ ID NO: 1527 - RNA, 20 nt, Homo sapiens
  source 1..20: mol_type = unassigned RNA
cccccatcagcacactcatg

SEQ ID NO: 1528 - RNA, 20 nt, Homo sapiens
  source 1..20: mol_type = unassigned RNA
gggctttggcgacaacacca

SEQ ID NO: 1529 - RNA, 20 nt, Homo sapiens
  source 1..20: mol_type = unassigned RNA
ggtgaccatgtgggtatttg

SEQ ID NO: 1530 - RNA, 20 nt, Homo sapiens
  source 1..20: mol_type = unassigned RNA
atccccatgagtgtgctgat

SEQ ID NO: 1531 - RNA, 20 nt, Homo sapiens
  source 1..20: mol_type = unassigned RNA
gatttggggtctgtaacaag

SEQ ID NO: 1532 - RNA, 20 nt, Homo sapiens
  source 1..20: mol_type = unassigned RNA
caggacaacataacgatgca

SEQ ID NO: 1533 - RNA, 20 nt, Homo sapiens
  source 1..20: mol_type = unassigned RNA
tggggtctgtaacaagagga

SEQ ID NO: 1534 - RNA, 20 nt, Homo sapiens
  source 1..20: mol_type = unassigned RNA
agagtccgtgaaaggtcccg

SEQ ID NO: 1535 - RNA, 20 nt, Homo sapiens
  source 1..20: mol_type = unassigned RNA
agatacctggcatacctgtg

SEQ ID NO: 1536 - RNA, 20 nt, Homo sapiens
  source 1..20: mol_type = unassigned RNA
tgccacagccaattacatgg

SEQ ID NO: 1537 - RNA, 20 nt, Homo sapiens
  source 1..20: mol_type = unassigned RNA
aaatgtgttatcaatgccac

SEQ ID NO: 1538 - RNA, 20 nt, Homo sapiens
  source 1..20: mol_type = other RNA
agaagacagacccccagaca

SEQ ID NO: 1539 - RNA, 20 nt, Homo sapiens
  source 1..20: mol_type = unassigned RNA
taccttcaacatcacaactc

SEQ ID NO: 1540 - RNA, 20 nt, Homo sapiens
  source 1..20: mol_type = unassigned RNA
agaagcactaaattgatcca

SEQ ID NO: 1541 - RNA, 20 nt, Homo sapiens
  source 1..20: mol_type = unassigned RNA
aagtgcgtgtgagcggcgca

SEQ ID NO: 1542 - RNA, 20 nt, Homo sapiens
  source 1..20: mol_type = unassigned RNA
caaatgtgttatcaatgcca

SEQ ID NO: 1543 - RNA, 20 nt, Homo sapiens
  source 1..20: mol_type = unassigned RNA
ttgcgcacagagtccgtgaa

SEQ ID NO: 1544 - RNA, 20 nt, Homo sapiens
  source 1..20: mol_type = unassigned RNA
gcaggaccaagtagaacagt

SEQ ID NO: 1545 - RNA, 20 nt, Homo sapiens
  source 1..20: mol_type = unassigned RNA
caggaccaagtagaacagtt

SEQ ID NO: 1546 - RNA, 20 nt, Homo sapiens
  source 1..20: mol_type = unassigned RNA
acagggaaagtgcgtgtgag

SEQ ID NO: 1547 - RNA, 20 nt, Homo sapiens
  source 1..20: mol_type = unassigned RNA
agtggccttattactatagc

SEQ ID NO: 1548 - RNA, 20 nt, Homo sapiens
  source 1..20: mol_type = unassigned RNA
tggcaaaagatgacgatcgc

SEQ ID NO: 1549 - RNA, 20 nt, Homo sapiens
  source 1..20: mol_type = unassigned RNA
gttgttgatatcagtgagag

SEQ ID NO: 1550 - RNA, 20 nt, Homo sapiens
  source 1..20: mol_type = unassigned RNA
actgagtatctgcagatttg

SEQ ID NO: 1551 - RNA, 20 nt, Homo sapiens
  source 1..20: mol_type = unassigned RNA
tggtgtgagatatctgcaga

SEQ ID NO: 1552 - RNA, 20 nt, Homo sapiens
  source 1..20: mol_type = unassigned RNA
gacaattacctgtaataacc

SEQ ID NO: 1553 - RNA, 20 nt, Homo sapiens
  source 1..20: mol_type = unassigned RNA
attcctaccagtgagaagag

SEQ ID NO: 1554 - RNA, 20 nt, Homo sapiens
  source 1..20: mol_type = unassigned RNA
catttcagaaccagttaaca

SEQ ID NO: 1555 - RNA, 20 nt, Homo sapiens
  source 1..20: mol_type = unassigned RNA
cagttaccttactactgggt

SEQ ID NO: 1556 - RNA, 20 nt, Homo sapiens
  source 1..20: mol_type = unassigned RNA
ggcacaacaccacgttatcg

SEQ ID NO: 1557 - RNA, 20 nt, Homo sapiens
  source 1..20: mol_type = unassigned RNA
tcagcgcacgatcactgtcg

SEQ ID NO: 1558 - RNA, 20 nt, Homo sapiens
  source 1..20: mol_type = unassigned RNA
gcagcaaaacgcctggatca

SEQ ID NO: 1559 - RNA, 20 nt, Homo sapiens
  source 1..20: mol_type = unassigned RNA
gcgtgtaggatggataaggt

SEQ ID NO: 1560 - RNA, 20 nt, Homo sapiens
  source 1..20: mol_type = unassigned RNA
agtcagcgcacgatcactgt

SEQ ID NO: 1561 - RNA, 20 nt, Homo sapiens
  source 1..20: mol_type = unassigned RNA
cactgtcggggtgtacgaag

SEQ ID NO: 1562 - RNA, 20 nt, Homo sapiens
  source 1..20: mol_type = unassigned RNA
cgtgtaggatggataaggtg

SEQ ID NO: 1563 - RNA, 20 nt, Homo sapiens
  source 1..20: mol_type = unassigned RNA
ctgctcttggagaccgacgc

SEQ ID NO: 1564 - RNA, 20 nt, Homo sapiens
  source 1..20: mol_type = unassigned RNA
ccacgttatcggggtcgctg

SEQ ID NO: 1565 - RNA, 20 nt, Homo sapiens
  source 1..20: mol_type = unassigned RNA
ccccagcgaccccgataacg

SEQ ID NO: 1566 - RNA, 20 nt, Homo sapiens
  source 1..20: mol_type = unassigned RNA
ctggagagcagaagaccgaa

SEQ ID NO: 1567 - RNA, 20 nt, Homo sapiens
  source 1..20: mol_type = unassigned RNA
gcccgcgtgtaggatggata

SEQ ID NO: 1568 - RNA, 20 nt, Homo sapiens
  source 1..20: mol_type = unassigned RNA
agtgatcgtgcgctgactca

SEQ ID NO: 1569 - RNA, 20 nt, Homo sapiens
  source 1..20: mol_type = unassigned RNA
accacgttatcggggtcgct

SEQ ID NO: 1570 - RNA, 20 nt, Homo sapiens
  source 1..20: mol_type = unassigned RNA
cgttctcgcagcaaaacgcc

SEQ ID NO: 1571 - RNA, 20 nt, Homo sapiens
  source 1..20: mol_type = unassigned RNA
cgaggacgacgacagagatg

SEQ ID NO: 1572 - RNA, 20 nt, Homo sapiens
  source 1..20: mol_type = unassigned RNA
atcctgcgcgtcagcaaccc

SEQ ID NO: 1573 - RNA, 20 nt, Homo sapiens
  source 1..20: mol_type = unassigned RNA
tgcgcgtcagcaacccgggc

SEQ ID NO: 1574 - RNA, 20 nt, Homo sapiens
  source 1..20: mol_type = unassigned RNA
cgcgtgtaggatggataagg

SEQ ID NO: 1575 - RNA, 20 nt, Homo sapiens
  source 1..20: mol_type = unassigned RNA
caggcacaacaccacgttat

SEQ ID NO: 1576 - RNA, 20 nt, Homo sapiens
  source 1..20: mol_type = unassigned RNA
catcctgcgcgtcagcaacc

SEQ ID NO: 1577 - RNA, 20 nt, Homo sapiens
  source 1..20: mol_type = unassigned RNA
cacttacacgttgagcagct

SEQ ID NO: 1578 - RNA, 20 nt, Homo sapiens
  source 1..20: mol_type = unassigned RNA
taaggtgggggatgccctgg

SEQ ID NO: 1579 - RNA, 20 nt, Homo sapiens
  source 1..20: mol_type = unassigned RNA
acgcctggatcagggtgaag

SEQ ID NO: 1580 - RNA, 20 nt, Homo sapiens
  source 1..20: mol_type = unassigned RNA
cagcgtcggtctccaagagc

SEQ ID NO: 1581 - RNA, 20 nt, Homo sapiens
  source 1..20: mol_type = unassigned RNA
acaacgacatcaacatcgtg

SEQ ID NO: 1582 - RNA, 20 nt, Homo sapiens
  source 1..20: mol_type = unassigned RNA
actcgtacacccccactgtg

SEQ ID NO: 1583 - RNA, 20 nt, Homo sapiens
  source 1..20: mol_type = unassigned RNA
gccaggatcgcctcacagtg

SEQ ID NO: 1584 - RNA, 20 nt, Homo sapiens
  source 1..20: mol_type = unassigned RNA
gaggcgatcctggcgctgag

SEQ ID NO: 1585 - RNA, 20 nt, Homo sapiens
  source 1..20: mol_type = unassigned RNA
cctcctcgtcaatggccaag

SEQ ID NO: 1586 - RNA, 20 nt, Homo sapiens
  source 1..20: mol_type = unassigned RNA
cacagtgggggtgtacgagt

SEQ ID NO: 1587 - RNA, 20 nt, Homo sapiens
  source 1..20: mol_type = unassigned RNA
gcgccaggatcgcctcacag

SEQ ID NO: 1588 - RNA, 20 nt, Homo sapiens
  source 1..20: mol_type = unassigned RNA
caccaaaagctcctccaccg

SEQ ID NO: 1589 - RNA, 20 nt, Homo sapiens
  source 1..20: mol_type = unassigned RNA
caaaagctcctccaccgcgg

SEQ ID NO: 1590 - RNA, 20 nt, Homo sapiens
  source 1..20: mol_type = unassigned RNA
gctcgtggcgtgcgacaacg

SEQ ID NO: 1591 - RNA, 20 nt, Homo sapiens
  source 1..20: mol_type = unassigned RNA
gactcacacattcatcaact

SEQ ID NO: 1592 - RNA, 20 nt, Homo sapiens
  source 1..20: mol_type = unassigned RNA
ccaggatcgcctcacagtgg

SEQ ID NO: 1593 - RNA, 20 nt, Homo sapiens
  source 1..20: mol_type = unassigned RNA
gagcgtgaagtggatttgca

SEQ ID NO: 1594 - RNA, 20 nt, Homo sapiens
  source 1..20: mol_type = unassigned RNA
ggcagaggaccacgctgtct

SEQ ID NO: 1595 - RNA, 20 nt, Homo sapiens
  source 1..20: mol_type = unassigned RNA
cccccactgtgaggcgatcc

SEQ ID NO: 1596 - RNA, 20 nt, Homo sapiens
  source 1..20: mol_type = unassigned RNA
gatgtcgttgtcacagcaga

SEQ ID NO: 1597 - RNA, 20 nt, Homo sapiens
  source 1..20: mol_type = unassigned RNA
aggactggatgagcgtgaag

SEQ ID NO: 1598 - RNA, 20 nt, Homo sapiens
  source 1..20: mol_type = unassigned RNA
caacgacatcaacatcgtgc

SEQ ID NO: 1599 - RNA, 20 nt, Homo sapiens
  source 1..20: mol_type = unassigned RNA
catcaacatcgtgcgggtgt

SEQ ID NO: 1600 - RNA, 20 nt, Homo sapiens
  source 1..20: mol_type = unassigned RNA
atcaacatcgtgcgggtgtc

SEQ ID NO: 1601 - RNA, 20 nt, Homo sapiens
  source 1..20: mol_type = unassigned RNA
gatgcagacggtgaccgccg

SEQ ID NO: 1602 - RNA, 20 nt, Homo sapiens
  source 1..20: mol_type = unassigned RNA
cctcagggacccagacagcg

SEQ ID NO: 1603 - RNA, 20 nt, Homo sapiens
  source 1..20: mol_type = unassigned RNA
tgagcgtgaagtggatttgc

SEQ ID NO: 1604 - RNA, 20 nt, Homo sapiens
  source 1..20: mol_type = unassigned RNA
gggtctcggccggctctccc

SEQ ID NO: 1605 - RNA, 20 nt, Homo sapiens
  source 1..20: mol_type = unassigned RNA
cgttgtcacagcagaaggac

SEQ ID NO: 1606 - RNA, 20 nt, Homo sapiens
  source 1..20: mol_type = unassigned RNA
tttggctgactcgtagacgc

SEQ ID NO: 1607 - RNA, 20 nt, Homo sapiens
  source 1..20: mol_type = unassigned RNA
gacatcgacatagtgcgcgt

SEQ ID NO: 1608 - RNA, 20 nt, Homo sapiens
  source 1..20: mol_type = unassigned RNA
cacagaaggtcacattgtcg

SEQ ID NO: 1609 - RNA, 20 nt, Homo sapiens
  source 1..20: mol_type = unassigned RNA
actcgtagacgccggcagtg

SEQ ID NO: 1610 - RNA, 20 nt, Homo sapiens
  source 1..20: mol_type = unassigned RNA
tccggaaagcacagccaggt

SEQ ID NO: 1611 - RNA, 20 nt, Homo sapiens
  source 1..20: mol_type = unassigned RNA
cgacatcgacatagtgcgcg

SEQ ID NO: 1612 - RNA, 20 nt, Homo sapiens
  source 1..20: mol_type = unassigned RNA
tgcgcgtgggcgatgtgcag

SEQ ID NO: 1613 - RNA, 20 nt, Homo sapiens
  source 1..20: mol_type = unassigned RNA
ttccggaaagcacagccagg

SEQ ID NO: 1614 - RNA, 20 nt, Homo sapiens
  source 1..20: mol_type = unassigned RNA
cacttacacgttcaagactt

SEQ ID NO: 1615 - RNA, 20 nt, Homo sapiens
  source 1..20: mol_type = unassigned RNA
cagcggctggcggctatcgt

SEQ ID NO: 1616 - RNA, 20 nt, Homo sapiens
  source 1..20: mol_type = other RNA
acccgcagccagcacacaga

SEQ ID NO: 1617 - RNA, 20 nt, Homo sapiens
  source 1..20: mol_type = unassigned RNA
gctgcgggtgaggaggacga

SEQ ID NO: 1618 - RNA, 20 nt, Homo sapiens
  source 1..20: mol_type = unassigned RNA
cgttctcgcagcagaaagcc

SEQ ID NO: 1619 - RNA, 20 nt, Homo sapiens
  source 1..20: mol_type = unassigned RNA
gcagcggctggcggctatcg

SEQ ID NO: 1620 - RNA, 20 nt, Homo sapiens
  source 1..20: mol_type = unassigned RNA
ccgcggccaggacacagttc

SEQ ID NO: 1621 - RNA, 20 nt, Homo sapiens
  source 1..20: mol_type = unassigned RNA
acacagaaggtcacattgtc

SEQ ID NO: 1622 - RNA, 20 nt, Homo sapiens
  source 1..20: mol_type = unassigned RNA
tgctttccggaactgtgtcc

SEQ ID NO: 1623 - RNA, 20 nt, Homo sapiens
  source 1..20: mol_type = unassigned RNA
gctgcatgagttgctgctgt

SEQ ID NO: 1624 - RNA, 20 nt, Homo sapiens
  source 1..20: mol_type = unassigned RNA
ctgctgtcggcgcagcgtca

SEQ ID NO: 1625 - RNA, 20 nt, Homo sapiens
  source 1..20: mol_type = unassigned RNA
cagttccggaaagcacagcc

SEQ ID NO: 1626 - RNA, 20 nt, Homo sapiens
  source 1..20: mol_type = unassigned RNA
caactcatgcagcgctttcc

SEQ ID NO: 1627 - RNA, 20 nt, Homo sapiens
  source 1..20: mol_type = unassigned RNA
tggctcctccgcaggatgca

SEQ ID NO: 1628 - RNA, 20 nt, Homo sapiens
  source 1..20: mol_type = unassigned RNA
aagcctggatcagcgtaaaa

SEQ ID NO: 1629 - RNA, 20 nt, Homo sapiens
  source 1..20: mol_type = unassigned RNA
tcccggcaccctgcatcctg

SEQ ID NO: 1630 - RNA, 20 nt, Homo sapiens
  source 1..20: mol_type = unassigned RNA
tgtgctggctgcgggtgagg

SEQ ID NO: 1631 - RNA, 20 nt, Homo sapiens
  source 1..20: mol_type = unassigned RNA
tggtatcatatacgtgaatg

SEQ ID NO: 1632 - RNA, 20 nt, Homo sapiens
  source 1..20: mol_type = unassigned RNA
actaaaggacaagtcaccac

SEQ ID NO: 1633 - RNA, 20 nt, Homo sapiens
  source 1..20: mol_type = unassigned RNA
aagtgtaccctaactagccg

SEQ ID NO: 1634 - RNA, 20 nt, Homo sapiens
  source 1..20: mol_type = unassigned RNA
aacagtaaccaacctcagtg

SEQ ID NO: 1635 - RNA, 20 nt, Homo sapiens
  source 1..20: mol_type = unassigned RNA
ttcacacatacaatgcactg

SEQ ID NO: 1636 - RNA, 20 nt, Homo sapiens
  source 1..20: mol_type = unassigned RNA
tatgtgtgaattacgttgtg

SEQ ID NO: 1637 - RNA, 20 nt, Homo sapiens
  source 1..20: mol_type = unassigned RNA
ttgtcctttagtaaacacta

SEQ ID NO: 1638 - RNA, 20 nt, Homo sapiens
  source 1..20: mol_type = unassigned RNA
actttgtctagtgcttccat

SEQ ID NO: 1639 - RNA, 20 nt, Homo sapiens
  source 1..20: mol_type = unassigned RNA
aagtcaccacaggacagtac

SEQ ID NO: 1640 - RNA, 20 nt, Homo sapiens
  source 1..20: mol_type = unassigned RNA
acagtaaccaacctcagtgt

SEQ ID NO: 1641 - RNA, 20 nt, Homo sapiens
  source 1..20: mol_type = unassigned RNA
agcaccaagcaggtcatagg

SEQ ID NO: 1642 - RNA, 20 nt, Homo sapiens
  source 1..20: mol_type = unassigned RNA
tatggtcaatgaattcaagt

SEQ ID NO: 1643 - RNA, 20 nt, Homo sapiens
  source 1..20: mol_type = unassigned RNA
acactgaggttggttactgt

SEQ ID NO: 1644 - RNA, 20 nt, Homo sapiens
  source 1..20: mol_type = unassigned RNA
acataaaaacaatattcact

SEQ ID NO: 1645 - RNA, 20 nt, Homo sapiens
  source 1..20: mol_type = unassigned RNA
agacaaagttcacctgaggt

SEQ ID NO: 1646 - RNA, 20 nt, Homo sapiens
  source 1..20: mol_type = unassigned RNA
tgaacataaagtctgcaaca

SEQ ID NO: 1647 - RNA, 20 nt, Homo sapiens
  source 1..20: mol_type = unassigned RNA
gggtcagcactacttcgaag

SEQ ID NO: 1648 - RNA, 20 nt, Homo sapiens
  source 1..20: mol_type = unassigned RNA
agatgcgaactcacattatg

SEQ ID NO: 1649 - RNA, 20 nt, Homo sapiens
  source 1..20: mol_type = unassigned RNA
tgtctagtgcttccatcgga

SEQ ID NO: 1650 - RNA, 20 nt, Homo sapiens
  source 1..20: mol_type = unassigned RNA
aaccataacaaaaccatcca

SEQ ID NO: 1651 - RNA, 20 nt, Homo sapiens
  source 1..20: mol_type = unassigned RNA
tggctttggcgtttcagcgg

SEQ ID NO: 1652 - RNA, 20 nt, Homo sapiens
  source 1..20: mol_type = unassigned RNA
agatatgattgtgtctccag

SEQ ID NO: 1653 - RNA, 20 nt, Homo sapiens
  source 1..20: mol_type = unassigned RNA
tactcatccatgtgaccatg

SEQ ID NO: 1654 - RNA, 20 nt, Homo sapiens
  source 1..20: mol_type = unassigned RNA
tttcctcagtcgacacagcc

SEQ ID NO: 1655 - RNA, 20 nt, Homo sapiens
  source 1..20: mol_type = unassigned RNA
ctgaagattcaaccggttta

SEQ ID NO: 1656 - RNA, 20 nt, Homo sapiens
  source 1..20: mol_type = unassigned RNA
atccagaccatgatcacaca

SEQ ID NO: 1657 - RNA, 20 nt, Homo sapiens
  source 1..20: mol_type = unassigned RNA
caacctctcgtacatcggcg

SEQ ID NO: 1658 - RNA, 20 nt, Homo sapiens
  source 1..20: mol_type = unassigned RNA
tggagccctgtaccaacgtg

SEQ ID NO: 1659 - RNA, 20 nt, Homo sapiens
  source 1..20: mol_type = unassigned RNA
cagaatatgtggccacacgt

SEQ ID NO: 1660 - RNA, 20 nt, Homo sapiens
  source 1..20: mol_type = unassigned RNA
aacctctcgtacatcggcga

SEQ ID NO: 1661 - RNA, 20 nt, Homo sapiens
  source 1..20: mol_type = unassigned RNA
cgccctcgccgatgtacgag

SEQ ID NO: 1662 - RNA, 20 nt, Homo sapiens
  source 1..20: mol_type = unassigned RNA
tgcaaacagatatatagtac

SEQ ID NO: 1663 - RNA, 20 nt, Homo sapiens
  source 1..20: mol_type = unassigned RNA
ggtgcagaacgttagctgaa

SEQ ID NO: 1664 - RNA, 20 nt, Homo sapiens
  source 1..20: mol_type = unassigned RNA
tacaccaacctctcgtacat

SEQ ID NO: 1665 - RNA, 20 nt, Homo sapiens
  source 1..20: mol_type = unassigned RNA
agtaggtctggtgctcaaag

SEQ ID NO: 1666 - RNA, 20 nt, Homo sapiens
  source 1..20: mol_type = unassigned RNA
tgtggccacacgttggtaca

SEQ ID NO: 1667 - RNA, 20 nt, Homo sapiens
  source 1..20: mol_type = unassigned RNA
cctactgccagagaaccctg

SEQ ID NO: 1668 - RNA, 20 nt, Homo sapiens
  source 1..20: mol_type = unassigned RNA
gcctacagaccaaatatcaa

SEQ ID NO: 1669 - RNA, 20 nt, Homo sapiens
  source 1..20: mol_type = unassigned RNA
atatatagtacaggacctca

SEQ ID NO: 1670 - RNA, 20 nt, Homo sapiens
  source 1..20: mol_type = unassigned RNA
tgtaaagatctgtttccatg

SEQ ID NO: 1671 - RNA, 20 nt, Homo sapiens
  source 1..20: mol_type = unassigned RNA
tacgagaggttggtgtagcg

SEQ ID NO: 1672 - RNA, 20 nt, Homo sapiens
  source 1..20: mol_type = unassigned RNA
catggtctggatctgcaaca

SEQ ID NO: 1673 - RNA, 20 nt, Homo sapiens
  source 1..20: mol_type = unassigned RNA
atggtctggatctgcaacac

SEQ ID NO: 1674 - RNA, 20 nt, Homo sapiens
  source 1..20: mol_type = unassigned RNA
gatccagaccatgatcacac

SEQ ID NO: 1675 - RNA, 20 nt, Homo sapiens
  source 1..20: mol_type = unassigned RNA
gctgaccttgagatcacagg

SEQ ID NO: 1676 - RNA, 20 nt, Homo sapiens
  source 1..20: mol_type = unassigned RNA
agggttcctgacagaatatg

SEQ ID NO: 1677 - RNA, 20 nt, Homo sapiens
  source 1..20: mol_type = unassigned RNA
ctcgccgatgtacgagaggt

SEQ ID NO: 1678 - RNA, 20 nt, Homo sapiens
  source 1..20: mol_type = unassigned RNA
tggtcaagataatgcttccc

SEQ ID NO: 1679 - RNA, 20 nt, Homo sapiens
  source 1..20: mol_type = unassigned RNA
agcagatatggtcattgctg

SEQ ID NO: 1680 - RNA, 20 nt, Homo sapiens
  source 1..20: mol_type = unassigned RNA
ttcagacatgagaacatcat

SEQ ID NO: 1681 - RNA, 20 nt, Homo sapiens
  source 1..20: mol_type = unassigned RNA
gctgggagcggtaaaaccgg

SEQ ID NO: 1682 - RNA, 20 nt, Homo sapiens
  source 1..20: mol_type = unassigned RNA
gaattgcagatgaacaagcg

SEQ ID NO: 1683 - RNA, 20 nt, Homo sapiens
  source 1..20: mol_type = unassigned RNA
aattgtccggggtcaaacag

SEQ ID NO: 1684 - RNA, 20 nt, Homo sapiens
  source 1..20: mol_type = unassigned RNA
tcacagatataaagaatgac

SEQ ID NO: 1685 - RNA, 20 nt, Homo sapiens
  source 1..20: mol_type = unassigned RNA
cattcatatccgagcagcag

SEQ ID NO: 1686 - RNA, 20 nt, Homo sapiens
  source 1..20: mol_type = unassigned RNA
tatttcagtggaattgtccg

SEQ ID NO: 1687 - RNA, 20 nt, Homo sapiens
  source 1..20: mol_type = unassigned RNA
gtggcttcagcatggaagtg

SEQ ID NO: 1688 - RNA, 20 nt, Homo sapiens
  source 1..20: mol_type = unassigned RNA
gtaggcgccctaagtttgaa

SEQ ID NO: 1689 - RNA, 20 nt, Homo sapiens
  source 1..20: mol_type = unassigned RNA
gtttgaagggcatccccctg

SEQ ID NO: 1690 - RNA, 20 nt, Homo sapiens
  source 1..20: mol_type = unassigned RNA
tgccgtgaatccctaagcca

SEQ ID NO: 1691 - RNA, 20 nt, Homo sapiens
  source 1..20: mol_type = unassigned RNA
aaacttagggcgcctacagt

SEQ ID NO: 1692 - RNA, 20 nt, Homo sapiens
  source 1..20: mol_type = unassigned RNA
tataaagaatgaccggtgca

SEQ ID NO: 1693 - RNA, 20 nt, Homo sapiens
  source 1..20: mol_type = unassigned RNA
ccattcatatccgagcagca

SEQ ID NO: 1694 - RNA, 20 nt, Homo sapiens
  source 1..20: mol_type = unassigned RNA
aaagactctgcacacttgcg

SEQ ID NO: 1695 - RNA, 20 nt, Homo sapiens
  source 1..20: mol_type = unassigned RNA
agataggctggagagaatgg

SEQ ID NO: 1696 - RNA, 20 nt, Homo sapiens
  source 1..20: mol_type = unassigned RNA
ctgctatagcagaagccgac

SEQ ID NO: 1697 - RNA, 20 nt, Homo sapiens
  source 1..20: mol_type = unassigned RNA
ccaattgctttctcagtgtg

SEQ ID NO: 1698 - RNA, 20 nt, Homo sapiens
  source 1..20: mol_type = unassigned RNA
caaacttagggcgcctacag

SEQ ID NO: 1699 - RNA, 20 nt, Homo sapiens
  source 1..20: mol_type = unassigned RNA
ttggaagtggatccttgcac

SEQ ID NO: 1700 - RNA, 20 nt, Homo sapiens
  source 1..20: mol_type = unassigned RNA
gacagcagattgcgacacac

SEQ ID NO: 1701 - RNA, 20 nt, Homo sapiens
  source 1..20: mol_type = unassigned RNA
tgaagttaccatgagaatca

SEQ ID NO: 1702 - RNA, 20 nt, Homo sapiens
  source 1..20: mol_type = other RNA
agaagccgacaggccacaga

SEQ ID NO: 1703 - RNA, 20 nt, Homo sapiens
  source 1..20: mol_type = unassigned RNA
caaccgtgatactcacccca

SEQ ID NO: 1704 - RNA, 20 nt, Homo sapiens
  source 1..20: mol_type = unassigned RNA
gcaattccaaaactttggat

SEQ ID NO: 1705 - RNA, 20 nt, Homo sapiens
  source 1..20: mol_type = unassigned RNA
ccgtagggctcttacctcag

SEQ ID NO: 1706 - RNA, 20 nt, Homo sapiens
  source 1..20: mol_type = unassigned RNA
cacatgcatacaagaccaca

SEQ ID NO: 1707 - RNA, 20 nt, Homo sapiens
  source 1..20: mol_type = unassigned RNA
gttgaggtagctctcgttag

SEQ ID NO: 1708 - RNA, 20 nt, Homo sapiens
  source 1..20: mol_type = unassigned RNA
gaaatgcgccacgatgtgga

SEQ ID NO: 1709 - RNA, 20 nt, Homo sapiens
  source 1..20: mol_type = unassigned RNA
tgaagaaatgcgccacgatg

SEQ ID NO: 1710 - RNA, 20 nt, Homo sapiens
  source 1..20: mol_type = unassigned RNA
tcacatgcatacaagaccac

SEQ ID NO: 1711 - RNA, 20 nt, Homo sapiens
  source 1..20: mol_type = unassigned RNA
tctgatgaactcagttgacg

SEQ ID NO: 1712 - RNA, 20 nt, Homo sapiens
  source 1..20: mol_type = unassigned RNA
tacatgtggacagtcaacac

SEQ ID NO: 1713 - RNA, 20 nt, Homo sapiens
  source 1..20: mol_type = unassigned RNA
tgccagaaaattgaggcacg

SEQ ID NO: 1714 - RNA, 20 nt, Homo sapiens
  source 1..20: mol_type = unassigned RNA
gtaccagaacaactcatagg

SEQ ID NO: 1715 - RNA, 20 nt, Homo sapiens
  source 1..20: mol_type = unassigned RNA
acacaaccactgaattgcta

SEQ ID NO: 1716 - RNA, 20 nt, Homo sapiens
  source 1..20: mol_type = unassigned RNA
tgtgtaccagaacaactcat

SEQ ID NO: 1717 - RNA, 20 nt, Homo sapiens
  source 1..20: mol_type = unassigned RNA
gtcaactgagttcatcagac

SEQ ID NO: 1718 - RNA, 20 nt, Homo sapiens
  source 1..20: mol_type = unassigned RNA
tattgtccttagcaattcag

SEQ ID NO: 1719 - RNA, 20 nt, Homo sapiens
  source 1..20: mol_type = unassigned RNA
cctgggttcattcttaccga

SEQ ID NO: 1720 - RNA, 20 nt, Homo sapiens
  source 1..20: mol_type = unassigned RNA
gttaaaattcaggcacagtg

SEQ ID NO: 1721 - RNA, 20 nt, Homo sapiens
  source 1..20: mol_type = unassigned RNA
aggacaatagcaggcgtcac

SEQ ID NO: 1722 - RNA, 20 nt, Homo sapiens
  source 1..20: mol_type = unassigned RNA
cttgccagaaaattgaggca

SEQ ID NO: 1723 - RNA, 20 nt, Homo sapiens
  source 1..20: mol_type = unassigned RNA
tcaacctggaacgctaccac

SEQ ID NO: 1724 - RNA, 20 nt, Homo sapiens
  source 1..20: mol_type = unassigned RNA
tatggacttaccccgtccca

SEQ ID NO: 1725 - RNA, 20 nt, Homo sapiens
  source 1..20: mol_type = unassigned RNA
tgtgcagagagagactgtct

SEQ ID NO: 1726 - RNA, 20 nt, Homo sapiens
  source 1..20: mol_type = unassigned RNA
ctaccactggagccagtccg

SEQ ID NO: 1727 - RNA, 20 nt, Homo sapiens
  source 1..20: mol_type = unassigned RNA
gtgccactccagcgaagata

SEQ ID NO: 1728 - RNA, 20 nt, Homo sapiens
  source 1..20: mol_type = unassigned RNA
tgcatagcggtctctacaga

SEQ ID NO: 1729 - RNA, 20 nt, Homo sapiens
  source 1..20: mol_type = unassigned RNA
ctggacagcagcgctactgg

SEQ ID NO: 1730 - RNA, 20 nt, Homo sapiens
  source 1..20: mol_type = unassigned RNA
ttgttactctagtgctgcag

SEQ ID NO: 1731 - RNA, 20 nt, Homo sapiens
  source 1..20: mol_type = unassigned RNA
accttcttgctgtataacca

SEQ ID NO: 1732 - RNA, 20 nt, Homo sapiens
  source 1..20: mol_type = unassigned RNA
tgcagcaagataccgagatg

SEQ ID NO: 1733 - RNA, 20 nt, Homo sapiens
  source 1..20: mol_type = unassigned RNA
atgactcatgaccgaaatga

SEQ ID NO: 1734 - RNA, 20 nt, Homo sapiens
  source 1..20: mol_type = unassigned RNA
gcaagataccgagatgaggt

SEQ ID NO: 1735 - RNA, 20 nt, Homo sapiens
  source 1..20: mol_type = unassigned RNA
agaacattccatattacctg

SEQ ID NO: 1736 - RNA, 20 nt, Homo sapiens
  source 1..20: mol_type = unassigned RNA
taattctgtaggcgtgcatg

SEQ ID NO: 1737 - RNA, 20 nt, Homo sapiens
  source 1..20: mol_type = unassigned RNA
aatcttcacaaatttgtgct

SEQ ID NO: 1738 - RNA, 20 nt, Homo sapiens
  source 1..20: mol_type = unassigned RNA
gaggttaagaacagatgctg

SEQ ID NO: 1739 - RNA, 20 nt, Homo sapiens
  source 1..20: mol_type = unassigned RNA
aatttagatacccaccctcc

SEQ ID NO: 1740 - RNA, 20 nt, Homo sapiens
  source 1..20: mol_type = unassigned RNA
acactcttggcttacctccg

SEQ ID NO: 1741 - RNA, 20 nt, Homo sapiens
  source 1..20: mol_type = unassigned RNA
gccaagagtgttcggcacat

SEQ ID NO: 1742 - RNA, 20 nt, Homo sapiens
  source 1..20: mol_type = unassigned RNA
ttaagactgatgcagccggg

SEQ ID NO: 1743 - RNA, 20 nt, Homo sapiens
  source 1..20: mol_type = unassigned RNA
ttacctccgaggatcacaga

SEQ ID NO: 1744 - RNA, 20 nt, Homo sapiens
  source 1..20: mol_type = unassigned RNA
tggtgactggcttattgctc

SEQ ID NO: 1745 - RNA, 20 nt, Homo sapiens
  source 1..20: mol_type = unassigned RNA
ttaccttattgcatatgtag

SEQ ID NO: 1746 - RNA, 20 nt, Homo sapiens
  source 1..20: mol_type = unassigned RNA
agagaccacccacctcatct

SEQ ID NO: 1747 - RNA, 20 nt, Homo sapiens
  source 1..20: mol_type = unassigned RNA
agcaagataccgagatgagg

SEQ ID NO: 1748 - RNA, 20 nt, Homo sapiens
  source 1..20: mol_type = unassigned RNA
ccttcttgctgtataaccaa

SEQ ID NO: 1749 - RNA, 20 nt, Homo sapiens
  source 1..20: mol_type = unassigned RNA
agatgtcatggaaatccgaa

SEQ ID NO: 1750 - RNA, 20 nt, Homo sapiens
  source 1..20: mol_type = unassigned RNA
atgtagaggctgtgatcatg

SEQ ID NO: 1751 - RNA, 20 nt, Homo sapiens
  source 1..20: mol_type = unassigned RNA
aaagactttacaggtatatc

SEQ ID NO: 1752 - RNA, 20 nt, Homo sapiens
  source 1..20: mol_type = unassigned RNA
ctacctccaccagatgttgg

SEQ ID NO: 1753 - RNA, 20 nt, Homo sapiens
  source 1..20: mol_type = unassigned RNA
tacttacccccaacatctgg

SEQ ID NO: 1754 - RNA, 20 nt, Homo sapiens
  source 1..20: mol_type = unassigned RNA
actacctccaccagatgttg

SEQ ID NO: 1755 - RNA, 20 nt, Homo sapiens
  source 1..20: mol_type = unassigned RNA
tcatccatttaccctcacaa

SEQ ID NO: 1756 - RNA, 20 nt, Homo sapiens
  source 1..20: mol_type = unassigned RNA
gctcttcgaatcggccgacg

SEQ ID NO: 1757 - RNA, 20 nt, Homo sapiens
  source 1..20: mol_type = unassigned RNA
gtgagccacggtgtgcacga

SEQ ID NO: 1758 - RNA, 20 nt, Homo sapiens
  source 1..20: mol_type = unassigned RNA
tcaggttctccatgactccg

SEQ ID NO: 1759 - RNA, 20 nt, Homo sapiens
  source 1..20: mol_type = unassigned RNA
ccacgtagcccataagctgg

SEQ ID NO: 1760 - RNA, 20 nt, Homo sapiens
  source 1..20: mol_type = unassigned RNA
gatgaggagatgagtgacct

SEQ ID NO: 1761 - RNA, 20 nt, Homo sapiens
  source 1..20: mol_type = unassigned RNA
tgatgcacacggctgccatg

SEQ ID NO: 1762 - RNA, 20 nt, Homo sapiens
  source 1..20: mol_type = unassigned RNA
ctaccacgtagcccataagc

SEQ ID NO: 1763 - RNA, 20 nt, Homo sapiens
  source 1..20: mol_type = unassigned RNA
aggtctatagtgaaaaaaag

SEQ ID NO: 1764 - RNA, 20 nt, Homo sapiens
  source 1..20: mol_type = other RNA
ggccgacgcggacggcaacg

SEQ ID NO: 1765 - RNA, 20 nt, Homo sapiens
  source 1..20: mol_type = unassigned RNA
gtgccactcatagcgagcaa

SEQ ID NO: 1766 - RNA, 20 nt, Homo sapiens
  source 1..20: mol_type = unassigned RNA
ccaccattgctcgctatgag

SEQ ID NO: 1767 - RNA, 20 nt, Homo sapiens
  source 1..20: mol_type = unassigned RNA
ccaccagcttatgggctacg

SEQ ID NO: 1768 - RNA, 20 nt, Homo sapiens
  source 1..20: mol_type = unassigned RNA
gctgtccctcgtgcacaccg

SEQ ID NO: 1769 - RNA, 20 nt, Homo sapiens
  source 1..20: mol_type = unassigned RNA
gctggctcaagtcctaccac

SEQ ID NO: 1770 - RNA, 20 nt, Homo sapiens
  source 1..20: mol_type = unassigned RNA
aggaatttgagtttgtccat

SEQ ID NO: 1771 - RNA, 20 nt, Homo sapiens
  source 1..20: mol_type = unassigned RNA
cagcagagcgacacctgtcg

SEQ ID NO: 1772 - RNA, 20 nt, Homo sapiens
  source 1..20: mol_type = unassigned RNA
ttatgggctacgtggtagtg

SEQ ID NO: 1773 - RNA, 20 nt, Homo sapiens
  source 1..20: mol_type = unassigned RNA
tgaagctgcagtcgaagttg

SEQ ID NO: 1774 - RNA, 20 nt, Homo sapiens
  source 1..20: mol_type = unassigned RNA
taggacttgagccagccacg

SEQ ID NO: 1775 - RNA, 20 nt, Homo sapiens
  source 1..20: mol_type = unassigned RNA
cagagcgacacctgtcgggg

SEQ ID NO: 1776 - RNA, 20 nt, Homo sapiens
  source 1..20: mol_type = unassigned RNA
gcaactggggcacctcaaag

SEQ ID NO: 1777 - RNA, 20 nt, Homo sapiens
  source 1..20: mol_type = unassigned RNA
acctgtcctacctcctcgtg

SEQ ID NO: 1778 - RNA, 20 nt, Homo sapiens
  source 1..20: mol_type = unassigned RNA
agcagctctgcatgtgaaag

SEQ ID NO: 1779 - RNA, 20 nt, Homo sapiens
  source 1..20: mol_type = unassigned RNA
agcagtgctcctgagcagaa

SEQ ID NO: 1780 - RNA, 20 nt, Homo sapiens
  source 1..20: mol_type = unassigned RNA
gtggttgtgccagtaggcgc

SEQ ID NO: 1781 - RNA, 20 nt, Homo sapiens
  source 1..20: mol_type = unassigned RNA
acttacacatatgaccacct

SEQ ID NO: 1782 - RNA, 20 nt, Homo sapiens
  source 1..20: mol_type = unassigned RNA
ttaatgctagaattcgaaag

SEQ ID NO: 1783 - RNA, 20 nt, Homo sapiens
  source 1..20: mol_type = unassigned RNA
ttgatgtcctcatgcatacg

SEQ ID NO: 1784 - RNA, 20 nt, Homo sapiens
  source 1..20: mol_type = unassigned RNA
tttagaggggaagcgtgctg

SEQ ID NO: 1785 - RNA, 20 nt, Homo sapiens
  source 1..20: mol_type = unassigned RNA
aacagtggtgcctcaaaacg

SEQ ID NO: 1786 - RNA, 20 nt, Homo sapiens
  source 1..20: mol_type = unassigned RNA
ggaacgaccgtcctccaagt

SEQ ID NO: 1787 - RNA, 20 nt, Homo sapiens
  source 1..20: mol_type = unassigned RNA
ggaagctaaaaaaccaatgg

SEQ ID NO: 1788 - RNA, 20 nt, Homo sapiens
  source 1..20: mol_type = unassigned RNA
ggcccttataggcagtccag

SEQ ID NO: 1789 - RNA, 20 nt, Homo sapiens
  source 1..20: mol_type = unassigned RNA
ctttcatgataacagaatcg

SEQ ID NO: 1790 - RNA, 20 nt, Homo sapiens
  source 1..20: mol_type = unassigned RNA
agtggatctctgataaaacc

SEQ ID NO: 1791 - RNA, 20 nt, Homo sapiens
  source 1..20: mol_type = unassigned RNA
ggccgggcagtaaaggcata

SEQ ID NO: 1792 - RNA, 20 nt, Homo sapiens
  source 1..20: mol_type = unassigned RNA
acagtggtgcctcaaaacgt

SEQ ID NO: 1793 - RNA, 20 nt, Homo sapiens
  source 1..20: mol_type = unassigned RNA
tttaacctatacttcttggg

SEQ ID NO: 1794 - RNA, 20 nt, Homo sapiens
  source 1..20: mol_type = unassigned RNA
tgcggttggaagtaatattg

SEQ ID NO: 1795 - RNA, 20 nt, Homo sapiens
  source 1..20: mol_type = unassigned RNA
tagaggttagggcacctaca

SEQ ID NO: 1796 - RNA, 20 nt, Homo sapiens
  source 1..20: mol_type = unassigned RNA
ggcacaagcagctacaacct

SEQ ID NO: 1797 - RNA, 20 nt, Homo sapiens
  source 1..20: mol_type = unassigned RNA
gggctttctcaatttcaaca

SEQ ID NO: 1798 - RNA, 20 nt, Homo sapiens
  source 1..20: mol_type = unassigned RNA
tcaaagacttaccgagccaa

SEQ ID NO: 1799 - RNA, 20 nt, Homo sapiens
  source 1..20: mol_type = unassigned RNA
tgacaccttatgcactgaag

SEQ ID NO: 1800 - RNA, 20 nt, Homo sapiens
  source 1..20: mol_type = unassigned RNA
gctgcataatgacttaaaag

SEQ ID NO: 1801 - RNA, 20 nt, Homo sapiens
  source 1..20: mol_type = unassigned RNA
tgtgccatgccagtaatgaa

SEQ ID NO: 1802 - RNA, 20 nt, Homo sapiens
  source 1..20: mol_type = unassigned RNA
tgtcctatttgtgaccaggg

SEQ ID NO: 1803 - RNA, 20 nt, Homo sapiens
  source 1..20: mol_type = unassigned RNA
ccatgccagtaatgaagggt

SEQ ID NO: 1804 - RNA, 20 nt, Homo sapiens
  source 1..20: mol_type = unassigned RNA
ggtggtcatatgtgtaagtg

SEQ ID NO: 1805 - RNA, 20 nt, Homo sapiens
  source 1..20: mol_type = unassigned RNA
gtagatgatttgggaacaac

SEQ ID NO: 1806 - RNA, 20 nt, Homo sapiens
  source 1..20: mol_type = unassigned RNA
atccacaggttcactaacgg

SEQ ID NO: 1807 - RNA, 20 nt, Homo sapiens
  source 1..20: mol_type = unassigned RNA
catccacaggttcactaacg

SEQ ID NO: 1808 - RNA, 20 nt, Homo sapiens
  source 1..20: mol_type = unassigned RNA
caggttcactaacgggggca

SEQ ID NO: 1809 - RNA, 20 nt, Homo sapiens
  source 1..20: mol_type = unassigned RNA
tgcccccgttagtgaacctg

SEQ ID NO: 1810 - RNA, 20 nt, Homo sapiens
  source 1..20: mol_type = unassigned RNA
acgcccatgacggagagtcc

SEQ ID NO: 1811 - RNA, 20 nt, Homo sapiens
  source 1..20: mol_type = unassigned RNA
tggctactgcgtacatccac

SEQ ID NO: 1812 - RNA, 20 nt, Homo sapiens
  source 1..20: mol_type = unassigned RNA
tacatccacaggttcactaa

SEQ ID NO: 1813 - RNA, 20 nt, Homo sapiens
  source 1..20: mol_type = unassigned RNA
cgcccatgacggagagtccg

SEQ ID NO: 1814 - RNA, 20 nt, Homo sapiens
  source 1..20: mol_type = unassigned RNA
ctccccggactctccgtcat

SEQ ID NO: 1815 - RNA, 20 nt, Homo sapiens
  source 1..20: mol_type = unassigned RNA
atgtggttcgagattctccc

SEQ ID NO: 1816 - RNA, 20 nt, Homo sapiens
  source 1..20: mol_type = unassigned RNA
gaaagagataggcgcatctc

SEQ ID NO: 1817 - RNA, 20 nt, Homo sapiens
  source 1..20: mol_type = unassigned RNA
caacaagcacacgcccatga

SEQ ID NO: 1818 - RNA, 20 nt, Homo sapiens
  source 1..20: mol_type = unassigned RNA
tgatcgttactatgtgtcaa

SEQ ID NO: 1819 - RNA, 20 nt, Homo sapiens
  source 1..20: mol_type = unassigned RNA
ggagtctgatggaaagagat

SEQ ID NO: 1820 - RNA, 20 nt, Homo sapiens
  source 1..20: mol_type = unassigned RNA
atgtacgcagtagccagtcc

SEQ ID NO: 1821 - RNA, 20 nt, Homo sapiens
  source 1..20: mol_type = unassigned RNA
taggtaacggggcagagatg

SEQ ID NO: 1822 - RNA, 20 nt, Homo sapiens
  source 1..20: mol_type = unassigned RNA
gaaaaaagggttgctcattt

SEQ ID NO: 1823 - RNA, 20 nt, Homo sapiens
  source 1..20: mol_type = unassigned RNA
cacgcccatgacggagagtc

SEQ ID NO: 1824 - RNA, 20 nt, Homo sapiens
  source 1..20: mol_type = unassigned RNA
acatccacaggttcactaac

SEQ ID NO: 1825 - RNA, 20 nt, Homo sapiens
  source 1..20: mol_type = unassigned RNA
gtgcttgttgattccaggac

SEQ ID NO: 1826 - RNA, 20 nt, Homo sapiens
  source 1..20: mol_type = unassigned RNA
tgggtatcactggagtctga

SEQ ID NO: 1827 - RNA, 20 nt, Homo sapiens
  source 1..20: mol_type = unassigned RNA
ggtttggagaacattgatta

SEQ ID NO: 1828 - RNA, 20 nt, Homo sapiens
  source 1..20: mol_type = unassigned RNA
ctcttatttgaaggaaaaaa

SEQ ID NO: 1829 - RNA, 20 nt, Homo sapiens
  source 1..20: mol_type = unassigned RNA
ggcgtgtgcttgttgattcc

SEQ ID NO: 1830 - RNA, 20 nt, Homo sapiens
  source 1..20: mol_type = unassigned RNA
actggaagcacgaatgacag

SEQ ID NO: 1831 - RNA, 20 nt, Homo sapiens
  source 1..20: mol_type = unassigned RNA
ttgtctatgaacatctgtgg

SEQ ID NO: 1832 - RNA, 20 nt, Homo sapiens
  source 1..20: mol_type = unassigned RNA
cctggtgggaaaacactgtg

SEQ ID NO: 1833 - RNA, 20 nt, Homo sapiens
  source 1..20: mol_type = unassigned RNA
aagtaggaaatccatagtgt

SEQ ID NO: 1834 - RNA, 20 nt, Homo sapiens
  source 1..20: mol_type = unassigned RNA
ggcaccaggtagtccaccat

SEQ ID NO: 1835 - RNA, 20 nt, Homo sapiens
  source 1..20: mol_type = unassigned RNA
tagatggcgtctgataccac

SEQ ID NO: 1836 - RNA, 20 nt, Homo sapiens
  source 1..20: mol_type = unassigned RNA
tttcaagttggatgcattgg

SEQ ID NO: 1837 - RNA, 20 nt, Homo sapiens
  source 1..20: mol_type = unassigned RNA
gaactactaaatctaatgct

SEQ ID NO: 1838 - RNA, 20 nt, Homo sapiens
  source 1..20: mol_type = unassigned RNA
aggctatgcagcttgcaaag

SEQ ID NO: 1839 - RNA, 20 nt, Homo sapiens
  source 1..20: mol_type = unassigned RNA
gacctcaccattcccaacgg

SEQ ID NO: 1840 - RNA, 20 nt, Homo sapiens
  source 1..20: mol_type = unassigned RNA
cttgtctatgaacatctgtg

SEQ ID NO: 1841 - RNA, 20 nt, Homo sapiens
  source 1..20: mol_type = unassigned RNA
agtgacctcaccattcccaa

SEQ ID NO: 1842 - RNA, 20 nt, Homo sapiens
  source 1..20: mol_type = unassigned RNA
cacaaacttactttgacctg

SEQ ID NO: 1843 - RNA, 20 nt, Homo sapiens
  source 1..20: mol_type = unassigned RNA
tgtgaaggcccatcccatgg

SEQ ID NO: 1844 - RNA, 20 nt, Homo sapiens
  source 1..20: mol_type = unassigned RNA
gggctcctgatcttgctctg

SEQ ID NO: 1845 - RNA, 20 nt, Homo sapiens
  source 1..20: mol_type = unassigned RNA
caaggagatggacctcagcg

SEQ ID NO: 1846 - RNA, 20 nt, Homo sapiens
  source 1..20: mol_type = unassigned RNA
gcatagccttctctagaaag

SEQ ID NO: 1847 - RNA, 20 nt, Homo sapiens
  source 1..20: mol_type = unassigned RNA
atggatttcctacttatggt

SEQ ID NO: 1848 - RNA, 20 nt, Homo sapiens
  source 1..20: mol_type = unassigned RNA
gaatctaaaaaggaccctga

SEQ ID NO: 1849 - RNA, 20 nt, Homo sapiens
  source 1..20: mol_type = unassigned RNA
tatggatttcctacttatgg

SEQ ID NO: 1850 - RNA, 20 nt, Homo sapiens
  source 1..20: mol_type = unassigned RNA
cttgcaaataggcaaggtca

SEQ ID NO: 1851 - RNA, 20 nt, Homo sapiens
  source 1..20: mol_type = unassigned RNA
tttcaataactttcccaaag

SEQ ID NO: 1852 - RNA, 20 nt, Homo sapiens
  source 1..20: mol_type = unassigned RNA
gcaaaacagagttacccaag

SEQ ID NO: 1853 - RNA, 20 nt, Homo sapiens
  source 1..20: mol_type = unassigned RNA
cagataaagaagaagtgcag

SEQ ID NO: 1854 - RNA, 20 nt, Homo sapiens
  source 1..20: mol_type = unassigned RNA
ccttcattctcaacttgtga

SEQ ID NO: 1855 - RNA, 20 nt, Homo sapiens
  source 1..20: mol_type = unassigned RNA
ggacgagaacggagacacgt

SEQ ID NO: 1856 - RNA, 20 nt, Homo sapiens
  source 1..20: mol_type = unassigned RNA
actcgactacggcgtcaccg

SEQ ID NO: 1857 - RNA, 20 nt, Homo sapiens
  source 1..20: mol_type = unassigned RNA
ccactccatagaatctccgg

SEQ ID NO: 1858 - RNA, 20 nt, Homo sapiens
  source 1..20: mol_type = unassigned RNA
gcccgagccctactcgacta

SEQ ID NO: 1859 - RNA, 20 nt, Homo sapiens
  source 1..20: mol_type = unassigned RNA
cgagggaccagccaagatcg

SEQ ID NO: 1860 - RNA, 20 nt, Homo sapiens
  source 1..20: mol_type = unassigned RNA
gttcacctattaccctctgg

SEQ ID NO: 1861 - RNA, 20 nt, Homo sapiens
  source 1..20: mol_type = unassigned RNA
tgatggatctgagtatagtg

SEQ ID NO: 1862 - RNA, 20 nt, Homo sapiens
  source 1..20: mol_type = unassigned RNA
gggaccagccaagatcgagg

SEQ ID NO: 1863 - RNA, 20 nt, Homo sapiens
  source 1..20: mol_type = unassigned RNA
cccactccatagaatctccg

SEQ ID NO: 1864 - RNA, 20 nt, Homo sapiens
  source 1..20: mol_type = unassigned RNA
ctgcaactgaaacgcaagcg

SEQ ID NO: 1865 - RNA, 20 nt, Homo sapiens
  source 1..20: mol_type = unassigned RNA
ggatctgcgccgtttctgtg

SEQ ID NO: 1866 - RNA, 20 nt, Homo sapiens
  source 1..20: mol_type = unassigned RNA
ctcctagatctgtaactacg

SEQ ID NO: 1867 - RNA, 20 nt, Homo sapiens
  source 1..20: mol_type = unassigned RNA
gatcacggggcagacgagtg

SEQ ID NO: 1868 - RNA, 20 nt, Homo sapiens
  source 1..20: mol_type = unassigned RNA
tggtgaggttgacaacgccg

SEQ ID NO: 1869 - RNA, 20 nt, Homo sapiens
  source 1..20: mol_type = unassigned RNA
tcctagatctgtaactacga

SEQ ID NO: 1870 - RNA, 20 nt, Homo sapiens
  source 1..20: mol_type = unassigned RNA
caactgaaacgcaagcgagg

SEQ ID NO: 1871 - RNA, 20 nt, Homo sapiens
  source 1..20: mol_type = unassigned RNA
tagtcacatgcaggacaccc

SEQ ID NO: 1872 - RNA, 20 nt, Homo sapiens
  source 1..20: mol_type = unassigned RNA
cccctgcacccatacccgta

SEQ ID NO: 1873 - RNA, 20 nt, Homo sapiens
  source 1..20: mol_type = unassigned RNA
actgcccagaggccgagcag

SEQ ID NO: 1874 - RNA, 20 nt, Homo sapiens
  source 1..20: mol_type = unassigned RNA
cattgaggttcggttctatg

SEQ ID NO: 1875 - RNA, 20 nt, Homo sapiens
  source 1..20: mol_type = unassigned RNA
acagttcacctattaccctc

SEQ ID NO: 1876 - RNA, 20 nt, Homo sapiens
  source 1..20: mol_type = unassigned RNA
cccagagcctccacccatgt

SEQ ID NO: 1877 - RNA, 20 nt, Homo sapiens
  source 1..20: mol_type = unassigned RNA
cagcccctaccagtccggcg

SEQ ID NO: 1878 - RNA, 20 nt, Homo sapiens
  source 1..20: mol_type = unassigned RNA
gaatggatggcaggcctttg

SEQ ID NO: 1879 - RNA, 20 nt, Homo sapiens
  source 1..20: mol_type = unassigned RNA
acctcgctgcagcatctccg

SEQ ID NO: 1880 - RNA, 20 nt, Homo sapiens
  source 1..20: mol_type = unassigned RNA
tgggcgaagagtctcctctg

SEQ ID NO: 1881 - RNA, 20 nt, Homo sapiens
  source 1..20: mol_type = unassigned RNA
gaggagaatcaagagctccg

SEQ ID NO: 1882 - RNA, 20 nt, Homo sapiens
  source 1..20: mol_type = unassigned RNA
agcatggctggcttccccag

SEQ ID NO: 1883 - RNA, 20 nt, Homo sapiens
  source 1..20: mol_type = unassigned RNA
gaatcaagagctccgaggtg

SEQ ID NO: 1884 - RNA, 20 nt, Homo sapiens
  source 1..20: mol_type = unassigned RNA
ctgggcgaagagtctcctct

SEQ ID NO: 1885 - RNA, 20 nt, Homo sapiens
  source 1..20: mol_type = unassigned RNA
tcttccagctgcattcccta

SEQ ID NO: 1886 - RNA, 20 nt, Homo sapiens
  source 1..20: mol_type = unassigned RNA
gaccctccagcgctgcctgg

SEQ ID NO: 1887 - RNA, 20 nt, Homo sapiens
  source 1..20: mol_type = unassigned RNA
gactcacttctcctccgagg

SEQ ID NO: 1888 - RNA, 20 nt, Homo sapiens
  source 1..20: mol_type = unassigned RNA
ccaggtgacgtccttgctcg

SEQ ID NO: 1889 - RNA, 20 nt, Homo sapiens
  source 1..20: mol_type = unassigned RNA
ctgcacctgccttcagaaca

SEQ ID NO: 1890 - RNA, 20 nt, Homo sapiens
  source 1..20: mol_type = unassigned RNA
cgtcacctgggctttcacag

SEQ ID NO: 1891 - RNA, 20 nt, Homo sapiens
  source 1..20: mol_type = unassigned RNA
gcagcagatcaggacgtact

SEQ ID NO: 1892 - RNA, 20 nt, Homo sapiens
  source 1..20: mol_type = unassigned RNA
ggcagagcaaccagattctg

SEQ ID NO: 1893 - RNA, 20 nt, Homo sapiens
  source 1..20: mol_type = unassigned RNA
cccgagcaaggacgtcacct

SEQ ID NO: 1894 - RNA, 20 nt, Homo sapiens
  source 1..20: mol_type = unassigned RNA
tggagaagctcgatctgaag

SEQ ID NO: 1895 - RNA, 20 nt, Homo sapiens
  source 1..20: mol_type = unassigned RNA
cacatcaagagcagcgtggt

SEQ ID NO: 1896 - RNA, 20 nt, Homo sapiens
  source 1..20: mol_type = unassigned RNA
caaccacatcaagagcagcg

SEQ ID NO: 1897 - RNA, 20 nt, Homo sapiens
  source 1..20: mol_type = unassigned RNA
gctgactcacttctcctccg

SEQ ID NO: 1898 - RNA, 20 nt, Homo sapiens
  source 1..20: mol_type = unassigned RNA
aggaaactggtggagagact

SEQ ID NO: 1899 - RNA, 20 nt, Homo sapiens
  source 1..20: mol_type = unassigned RNA
gagcgccctgttctgaaggc

SEQ ID NO: 1900 - RNA, 20 nt, Homo sapiens
  source 1..20: mol_type = unassigned RNA
gtggaccagctgcgcatgca

SEQ ID NO: 1901 - RNA, 20 nt, Homo sapiens
  source 1..20: mol_type = unassigned RNA
tgcatttccaagccagccag

SEQ ID NO: 1902 - RNA, 20 nt, Homo sapiens
  source 1..20: mol_type = unassigned RNA
ccacatcaagagcagcgtgg

SEQ ID NO: 1903 - RNA, 20 nt, Homo sapiens
  source 1..20: mol_type = unassigned RNA
aatgccaggctctggagggt

SEQ ID NO: 1904 - RNA, 20 nt, Homo sapiens
  source 1..20: mol_type = unassigned RNA
gcagcagcagcacagcgtgc

SEQ ID NO: 1905 - RNA, 20 nt, Homo sapiens
  source 1..20: mol_type = unassigned RNA
tttgtcaataagcccacgcg

SEQ ID NO: 1906 - RNA, 20 nt, Homo sapiens
  source 1..20: mol_type = unassigned RNA
agtactataatgacttcccg

SEQ ID NO: 1907 - RNA, 20 nt, Homo sapiens
  source 1..20: mol_type = unassigned RNA
ccagggcacgcattgactgg

SEQ ID NO: 1908 - RNA, 20 nt, Homo sapiens
  source 1..20: mol_type = unassigned RNA
gctttgtcaataagcccacg

SEQ ID NO: 1909 - RNA, 20 nt, Homo sapiens
  source 1..20: mol_type = unassigned RNA
ttaccaatgtagctcccaag

SEQ ID NO: 1910 - RNA, 20 nt, Homo sapiens
  source 1..20: mol_type = unassigned RNA
gcttattgacaaagctcccg

SEQ ID NO: 1911 - RNA, 20 nt, Homo sapiens
  source 1..20: mol_type = unassigned RNA
acattctggagtgtcccgaa

SEQ ID NO: 1912 - RNA, 20 nt, Homo sapiens
  source 1..20: mol_type = unassigned RNA
tctatctcatttgcatccgg

SEQ ID NO: 1913 - RNA, 20 nt, Homo sapiens
  source 1..20: mol_type = unassigned RNA
ctttgtcaataagcccacgc

SEQ ID NO: 1914 - RNA, 20 nt, Homo sapiens
  source 1..20: mol_type = unassigned RNA
cttcgggacactccagaatg

SEQ ID NO: 1915 - RNA, 20 nt, Homo sapiens
  source 1..20: mol_type = unassigned RNA
ccctgtgaatcagagaggtg

SEQ ID NO: 1916 - RNA, 20 nt, Homo sapiens
  source 1..20: mol_type = unassigned RNA
caaatgagatagattgcatg

SEQ ID NO: 1917 - RNA, 20 nt, Homo sapiens
  source 1..20: mol_type = unassigned RNA
ttagtacatgggttgtgtgg

SEQ ID NO: 1918 - RNA, 20 nt, Homo sapiens
  source 1..20: mol_type = unassigned RNA
ttgtttgaagcgcaactcga

SEQ ID NO: 1919 - RNA, 20 nt, Homo sapiens
  source 1..20: mol_type = unassigned RNA
tattgacaaagctcccgtgg

SEQ ID NO: 1920 - RNA, 20 nt, Homo sapiens
  source 1..20: mol_type = unassigned RNA
ttcactcacccgaaccaagt

SEQ ID NO: 1921 - RNA, 20 nt, Homo sapiens
  source 1..20: mol_type = unassigned RNA
cagtactataatgacttccc

SEQ ID NO: 1922 - RNA, 20 nt, Homo sapiens
  source 1..20: mol_type = unassigned RNA
gtgctaagggggcgacaagg

SEQ ID NO: 1923 - RNA, 20 nt, Homo sapiens
  source 1..20: mol_type = unassigned RNA
catcccaacgacaaagtcat

SEQ ID NO: 1924 - RNA, 20 nt, Homo sapiens
  source 1..20: mol_type = unassigned RNA
atgagatagattgcatgtgg

SEQ ID NO: 1925 - RNA, 20 nt, Homo sapiens
  source 1..20: mol_type = unassigned RNA
cgggtgctaagggggcgaca

SEQ ID NO: 1926 - RNA, 20 nt, Homo sapiens
  source 1..20: mol_type = unassigned RNA
aaagaccctgtgaatcagag

SEQ ID NO: 1927 - RNA, 20 nt, Homo sapiens
  source 1..20: mol_type = unassigned RNA
tgcgcttcaaacaatacctc

SEQ ID NO: 1928 - RNA, 20 nt, Homo sapiens
  source 1..20: mol_type = unassigned RNA
catcaaagccagccatcctg

SEQ ID NO: 1929 - RNA, 20 nt, Homo sapiens
  source 1..20: mol_type = unassigned RNA
cccttcatacctggacaggg

SEQ ID NO: 1930 - RNA, 20 nt, Homo sapiens
  source 1..20: mol_type = unassigned RNA
ttcatccacaaacccgcgca

SEQ ID NO: 1931 - RNA, 20 nt, Homo sapiens
  source 1..20: mol_type = unassigned RNA
attactacaacagcatcccg

SEQ ID NO: 1932 - RNA, 20 nt, Homo sapiens
  source 1..20: mol_type = unassigned RNA
ggggccgcgaacttccactg

SEQ ID NO: 1933 - RNA, 20 nt, Homo sapiens
  source 1..20: mol_type = unassigned RNA
ccaggacatgacggattacg

SEQ ID NO: 1934 - RNA, 20 nt, Homo sapiens
  source 1..20: mol_type = unassigned RNA
cctgacgcgaaggagatgga

SEQ ID NO: 1935 - RNA, 20 nt, Homo sapiens
  source 1..20: mol_type = unassigned RNA
aatgccgcagtggaagttcg

SEQ ID NO: 1936 - RNA, 20 nt, Homo sapiens
  source 1..20: mol_type = unassigned RNA
ttacgtggcctacgtcgcca

SEQ ID NO: 1937 - RNA, 20 nt, Homo sapiens
  source 1..20: mol_type = unassigned RNA
agccatcaaccggctccatg

SEQ ID NO: 1938 - RNA, 20 nt, Homo sapiens
  source 1..20: mol_type = unassigned RNA
gggactcacccgcacgacgt

SEQ ID NO: 1939 - RNA, 20 nt, Homo sapiens
  source 1..20: mol_type = unassigned RNA
ctggctacaccccgacgcca

SEQ ID NO: 1940 - RNA, 20 nt, Homo sapiens
  source 1..20: mol_type = unassigned RNA
tccatctccttcgcgtcagg

SEQ ID NO: 1941 - RNA, 20 nt, Homo sapiens
  source 1..20: mol_type = unassigned RNA
tcgatgcagcccatgtactg

SEQ ID NO: 1942 - RNA, 20 nt, Homo sapiens
  source 1..20: mol_type = unassigned RNA
ggactttaacacgcgcacgc

SEQ ID NO: 1943 - RNA, 20 nt, Homo sapiens
  source 1..20: mol_type = unassigned RNA
cgtgcgcgtgttaaagtcca

SEQ ID NO: 1944 - RNA, 20 nt, Homo sapiens
  source 1..20: mol_type = unassigned RNA
gatggggtccttggcgacgt

SEQ ID NO: 1945 - RNA, 20 nt, Homo sapiens
  source 1..20: mol_type = unassigned RNA
acgtaatccgtcatgtcctg

SEQ ID NO: 1946 - RNA, 20 nt, Homo sapiens
  source 1..20: mol_type = unassigned RNA
gctgcccttccggatccact

SEQ ID NO: 1947 - RNA, 20 nt, Homo sapiens
  source 1..20: mol_type = unassigned RNA
ggggtgtagccagccgtgcg

SEQ ID NO: 1948 - RNA, 20 nt, Homo sapiens
  source 1..20: mol_type = unassigned RNA
gccgccgagtggatccggaa

SEQ ID NO: 1949 - RNA, 20 nt, Homo sapiens
  source 1..20: mol_type = unassigned RNA
caattactacaacagcatcc

SEQ ID NO: 1950 - RNA, 20 nt, Homo sapiens
  source 1..20: mol_type = unassigned RNA
cagagcatcatcagcaccgt

SEQ ID NO: 1951 - RNA, 20 nt, Homo sapiens
  source 1..20: mol_type = unassigned RNA
gtggatggagatgctcatgc

SEQ ID NO: 1952 - RNA, 20 nt, Homo sapiens
  source 1..20: mol_type = other RNA
gcgaccccgcgccccgacag

SEQ ID NO: 1953 - RNA, 20 nt, Homo sapiens
  source 1..20: mol_type = unassigned RNA
catctcttagagaaggagat

SEQ ID NO: 1954 - RNA, 20 nt, Homo sapiens
  source 1..20: mol_type = other RNA
cgcggacccccaacccgagc

SEQ ID NO: 1955 - RNA, 20 nt, Homo sapiens
  source 1..20: mol_type = unassigned RNA
tcatagcgaatcaccacatg

SEQ ID NO: 1956 - RNA, 20 nt, Homo sapiens
  source 1..20: mol_type = unassigned RNA
attccaaaatgtgacaagct

SEQ ID NO: 1957 - RNA, 20 nt, Homo sapiens
  source 1..20: mol_type = unassigned RNA
aaagagcagacttattacca

SEQ ID NO: 1958 - RNA, 20 nt, Homo sapiens
  source 1..20: mol_type = unassigned RNA
actcaccgatcatggagagc

SEQ ID NO: 1959 - RNA, 20 nt, Homo sapiens
  source 1..20: mol_type = unassigned RNA
ttgaagttctgcgctcaatg

SEQ ID NO: 1960 - RNA, 20 nt, Homo sapiens
  source 1..20: mol_type = unassigned RNA
gcttacctctgcgattaaca

SEQ ID NO: 1961 - RNA, 20 nt, Homo sapiens
  source 1..20: mol_type = unassigned RNA
ttgaccacgtaggtgactcc

SEQ ID NO: 1962 - RNA, 20 nt, Homo sapiens
  source 1..20: mol_type = unassigned RNA
cgaaggagatggaccgcatg

SEQ ID NO: 1963 - RNA, 20 nt, Homo sapiens
  source 1..20: mol_type = unassigned RNA
tattaccagggaagacactt

SEQ ID NO: 1964 - RNA, 20 nt, Homo sapiens
  source 1..20: mol_type = unassigned RNA
cagtctgaacctgcgaactc

SEQ ID NO: 1965 - RNA, 20 nt, Homo sapiens
  source 1..20: mol_type = unassigned RNA
gagctcaaaggcttgtccga

SEQ ID NO: 1966 - RNA, 20 nt, Homo sapiens
  source 1..20: mol_type = unassigned RNA
ttgcttaaaccggagctcaa

SEQ ID NO: 1967 - RNA, 20 nt, Homo sapiens
  source 1..20: mol_type = unassigned RNA
tgctcattcccgcaaactgg

SEQ ID NO: 1968 - RNA, 20 nt, Homo sapiens
  source 1..20: mol_type = unassigned RNA
cgcacccaccttgaccacgt

SEQ ID NO: 1969 - RNA, 20 nt, Homo sapiens
  source 1..20: mol_type = unassigned RNA
tccctacttggtgtccggcg

SEQ ID NO: 1970 - RNA, 20 nt, Homo sapiens
  source 1..20: mol_type = unassigned RNA
tgggctgtgtcaggagcatg

SEQ ID NO: 1971 - RNA, 20 nt, Homo sapiens
  source 1..20: mol_type = unassigned RNA
gtatcaagaaagccccctgg

SEQ ID NO: 1972 - RNA, 20 nt, Homo sapiens
  source 1..20: mol_type = unassigned RNA
cgcctcgccggacaccaagt

SEQ ID NO: 1973 - RNA, 20 nt, Homo sapiens
  source 1..20: mol_type = unassigned RNA
cggagttcgcaggttcagac

SEQ ID NO: 1974 - RNA, 20 nt, Homo sapiens
  source 1..20: mol_type = unassigned RNA
ggggcccggagtcacctacg

SEQ ID NO: 1975 - RNA, 20 nt, Homo sapiens
  source 1..20: mol_type = unassigned RNA
ggatgctgttgtagtatggg

SEQ ID NO: 1976 - RNA, 20 nt, Homo sapiens
  source 1..20: mol_type = unassigned RNA
gggcgcactgccgtccgggg

SEQ ID NO: 1977 - RNA, 20 nt, Homo sapiens
  source 1..20: mol_type = unassigned RNA
cattccaaaatgtgacaagc

SEQ ID NO: 1978 - RNA, 20 nt, Homo sapiens
  source 1..20: mol_type = unassigned RNA
ccgctgcccaggccccctcg

SEQ ID NO: 1979 - RNA, 20 nt, Homo sapiens
  source 1..20: mol_type = unassigned RNA
cctggaggaggcatcttgct

SEQ ID NO: 1980 - RNA, 20 nt, Homo sapiens
  source 1..20: mol_type = unassigned RNA
acttacaggatcccctccag

SEQ ID NO: 1981 - RNA, 20 nt, Homo sapiens
  source 1..20: mol_type = unassigned RNA
aaagatccagttaatcaacg

SEQ ID NO: 1982 - RNA, 20 nt, Homo sapiens
  source 1..20: mol_type = unassigned RNA
tccggagctaccttcgtcca

SEQ ID NO: 1983 - RNA, 20 nt, Homo sapiens
  source 1..20: mol_type = unassigned RNA
gcacgaatcaggggttaggg

SEQ ID NO: 1984 - RNA, 20 nt, Homo sapiens
  source 1..20: mol_type = unassigned RNA
gttgataggaacttaactgg

SEQ ID NO: 1985 - RNA, 20 nt, Homo sapiens
  source 1..20: mol_type = unassigned RNA
cacatattggaatgccacaa

SEQ ID NO: 1986 - RNA, 20 nt, Homo sapiens
  source 1..20: mol_type = unassigned RNA
gcatattgatagccatgccg

SEQ ID NO: 1987 - RNA, 20 nt, Homo sapiens
  source 1..20: mol_type = unassigned RNA
tgatcgactcgttccgaaag

SEQ ID NO: 1988 - RNA, 20 nt, Homo sapiens
  source 1..20: mol_type = unassigned RNA
gggcatgaactactgtgtga

SEQ ID NO: 1989 - RNA, 20 nt, Homo sapiens
  source 1..20: mol_type = unassigned RNA
tctgaaacaccacctactgg

SEQ ID NO: 1990 - RNA, 20 nt, Homo sapiens
  source 1..20: mol_type = unassigned RNA
gtggcattccaatatgtgac

SEQ ID NO: 1991 - RNA, 20 nt, Homo sapiens
  source 1..20: mol_type = unassigned RNA
aactggatctttagctacgt

SEQ ID NO: 1992 - RNA, 20 nt, Homo sapiens
  source 1..20: mol_type = unassigned RNA
cgtcttgggccattccattg

SEQ ID NO: 1993 - RNA, 20 nt, Homo sapiens
  source 1..20: mol_type = unassigned RNA
gagttcaaaagcctgcccta

SEQ ID NO: 1994 - RNA, 20 nt, Homo sapiens
  source 1..20: mol_type = unassigned RNA
aggaagcgggcacgaatcag

SEQ ID NO: 1995 - RNA, 20 nt, Homo sapiens
  source 1..20: mol_type = unassigned RNA
gaggcacctctttggtaccc

SEQ ID NO: 1996 - RNA, 20 nt, Homo sapiens
  source 1..20: mol_type = unassigned RNA
gcggatcaaagttcaagcca

SEQ ID NO: 1997 - RNA, 20 nt, Homo sapiens
  source 1..20: mol_type = unassigned RNA
gccaacacttaggagcaggc

SEQ ID NO: 1998 - RNA, 20 nt, Homo sapiens
  source 1..20: mol_type = unassigned RNA
cgtcataagtaccatagggc

SEQ ID NO: 1999 - RNA, 20 nt, Homo sapiens
  source 1..20: mol_type = unassigned RNA
aagacgtcataagtaccata

SEQ ID NO: 2000 - RNA, 20 nt, Homo sapiens
  source 1..20: mol_type = unassigned RNA
caagacgtcataagtaccat

SEQ ID NO: 2001 - RNA, 20 nt, Homo sapiens
  source 1..20: mol_type = unassigned RNA
gggggatcaaggtgcacagt

SEQ ID NO: 2002 - RNA, 20 nt, Homo sapiens
  source 1..20: mol_type = unassigned RNA
tccttggacgaaggtagctc

SEQ ID NO: 2003 - RNA, 20 nt, Homo sapiens
  source 1..20: mol_type = unassigned RNA
gcagtaagccatttgttccg

SEQ ID NO: 2004 - RNA, 20 nt, Homo sapiens
  source 1..20: mol_type = unassigned RNA
gctctcctgcgacggcaagg

SEQ ID NO: 2005 - RNA, 20 nt, Homo sapiens
  source 1..20: mol_type = unassigned RNA
acactgccgagggcaccagg

SEQ ID NO: 2006 - RNA, 20 nt, Homo sapiens
  source 1..20: mol_type = unassigned RNA
ggcgggcggtcccacccagg

SEQ ID NO: 2007 - RNA, 20 nt, Homo sapiens
  source 1..20: mol_type = unassigned RNA
tgctccgccagcgagagcga

SEQ ID NO: 2008 - RNA, 20 nt, Homo sapiens
  source 1..20: mol_type = unassigned RNA
caggccctctacgggctccg

SEQ ID NO: 2009 - RNA, 20 nt, Homo sapiens
  source 1..20: mol_type = unassigned RNA
gccagcgagagcgagggctg

SEQ ID NO: 2010 - RNA, 20 nt, Homo sapiens
  source 1..20: mol_type = other RNA
ccagcgggaaccccccaggg

SEQ ID NO: 2011 - RNA, 20 nt, Homo sapiens
  source 1..20: mol_type = unassigned RNA
gtgccctcggcagtgtcctg

SEQ ID NO: 2012 - RNA, 20 nt, Homo sapiens
  source 1..20: mol_type = unassigned RNA
aggccgcaggacactgccga

SEQ ID NO: 2013 - RNA, 20 nt, Homo sapiens
  source 1..20: mol_type = unassigned RNA
ctcctccccgcggactcccg

SEQ ID NO: 2014 - RNA, 20 nt, Homo sapiens
  source 1..20: mol_type = unassigned RNA
cagctccccggagcccgtag

SEQ ID NO: 2015 - RNA, 20 nt, Homo sapiens
  source 1..20: mol_type = unassigned RNA
tctggcgggcggtcccaccc

SEQ ID NO: 2016 - RNA, 20 nt, Homo sapiens
  source 1..20: mol_type = unassigned RNA
gaggccgcaggacactgccg

SEQ ID NO: 2017 - RNA, 20 nt, Homo sapiens
  source 1..20: mol_type = unassigned RNA
aggacactgccgagggcacc

SEQ ID NO: 2018 - RNA, 20 nt, Homo sapiens
  source 1..20: mol_type = other RNA
aggccagcgggaacccccca

SEQ ID NO: 2019 - RNA, 20 nt, Homo sapiens
  source 1..20: mol_type = other RNA
agctccccggagcccgtaga

SEQ ID NO: 2020 - RNA, 20 nt, Homo sapiens
  source 1..20: mol_type = other RNA
tcagccctcgctctcgctgg

SEQ ID NO: 2021 - RNA, 20 nt, Homo sapiens
  source 1..20: mol_type = other RNA
gagggcaccaggcggccgag

SEQ ID NO: 2022 - RNA, 20 nt, Homo sapiens
  source 1..20: mol_type = other RNA
gccgtcaccgccgccctggg

SEQ ID NO: 2023 - RNA, 20 nt, Homo sapiens
  source 1..20: mol_type = other RNA
ggggcgcagaggtaggcagc

SEQ ID NO: 2024 - RNA, 20 nt, Homo sapiens
  source 1..20: mol_type = other RNA
tcctcagccctcgctctcgc

SEQ ID NO: 2025 - RNA, 20 nt, Homo sapiens
  source 1..20: mol_type = other RNA
tcctgcggcctctgcgagcc

SEQ ID NO: 2026 - RNA, 20 nt, Homo sapiens
  source 1..20: mol_type = other RNA
ggcactcaccgtccgggcgc

SEQ ID NO: 2027 - RNA, 20 nt, Homo sapiens
  source 1..20: mol_type = other RNA
gccaggccctctacgggctc

SEQ ID NO: 2028 - RNA, 20 nt, Homo sapiens
  source 1..20: mol_type = other RNA
ccgtccgggcgcgggcctcg

SEQ ID NO: 2029 - RNA, 20 nt, Homo sapiens
  source 1..20: mol_type = other RNA
gccagagcccccggggcgct

SEQ ID NO: 2030 - RNA, 20 nt, Homo sapiens
  source 1..20: mol_type = other RNA
gcaatttgggtagaatttcg

SEQ ID NO: 2031 - RNA, 20 nt, Homo sapiens
  source 1..20: mol_type = other RNA
gttcgaacaggtatctacca

SEQ ID NO: 2032 - RNA, 20 nt, Homo sapiens
  source 1..20: mol_type = other RNA
gtgcactatttataacccaa

SEQ ID NO: 2033 - RNA, 20 nt, Homo sapiens
  source 1..20: mol_type = other RNA
accatatcaaattcacacac

SEQ ID NO: 2034 - RNA, 20 nt, Homo sapiens
  source 1..20: mol_type = other RNA
gaagctgtataatgcttggg

SEQ ID NO: 2035 - RNA, 20 nt, Homo sapiens
  source 1..20: mol_type = other RNA
ctctactatgaggtgaattg

SEQ ID NO: 2036 - RNA, 20 nt, Homo sapiens
  source 1..20: mol_type = other RNA
acagctacaccatatatgaa

SEQ ID NO: 2037 - RNA, 20 nt, Homo sapiens
  source 1..20: mol_type = other RNA
ttgccttaccagtcctgcgt

SEQ ID NO: 2038 - RNA, 20 nt, Homo sapiens
  source 1..20: mol_type = other RNA
tgttatagggcaaataatag

SEQ ID NO: 2039 - RNA, 20 nt, Homo sapiens
  source 1..20: mol_type = other RNA
acatacattgctctactatg

SEQ ID NO: 2040 - RNA, 20 nt, Homo sapiens
  source 1..20: mol_type = other RNA
acagcaaaacctcgaaccat

SEQ ID NO: 2041 - RNA, 20 nt, Homo sapiens
  source 1..20: mol_type = other RNA
aacctcgaaccataggatct

SEQ ID NO: 2042 - RNA, 20 nt, Homo sapiens
  source 1..20: mol_type = other RNA
aaatattcgagacattgata

SEQ ID NO: 2043 - RNA, 20 nt, Homo sapiens
  source 1..20: mol_type = other RNA
tcataccaatttctcgattg

SEQ ID NO: 2044 - RNA, 20 nt, Homo sapiens
  source 1..20: mol_type = other RNA
ggatttagctattcccacgc

SEQ ID NO: 2045 - RNA, 20 nt, Homo sapiens
  source 1..20: mol_type = other RNA
ttgctctgttaaaggccgaa

SEQ ID NO: 2046 - RNA, 20 nt, Homo sapiens
  source 1..20: mol_type = other RNA
ttctcgggatacagaccaat

SEQ ID NO: 2047 - RNA, 20 nt, Homo sapiens
  source 1..20: mol_type = other RNA
ctcaccttatactgactcag

SEQ ID NO: 2048 - RNA, 20 nt, Homo sapiens
  source 1..20: mol_type = other RNA
agcaaatcttctaatccatg

SEQ ID NO: 2049 - RNA, 20 nt, Homo sapiens
  source 1..20: mol_type = other RNA
ataagaagctgtataatgct

SEQ ID NO: 2050 - RNA, 20 nt, Homo sapiens
  source 1..20: mol_type = other RNA
tcaaactccaactctaagca

SEQ ID NO: 2051 - RNA, 20 nt, Homo sapiens
  source 1..20: mol_type = other RNA
ccttacctgggattggaaca

SEQ ID NO: 2052 - RNA, 20 nt, Homo sapiens
  source 1..20: mol_type = other RNA
ggaacactgtccattggcat

SEQ ID NO: 2053 - RNA, 20 nt, Homo sapiens
  source 1..20: mol_type = other RNA
aaaacagttagccagaggtt

SEQ ID NO: 2054 - RNA, 20 nt, Homo sapiens
  source 1..20: mol_type = other RNA
tcttgaagaagttgatggag

SEQ ID NO: 2055 - RNA, 20 nt, Homo sapiens
  source 1..20: mol_type = other RNA
tgtagcgtgggtaaatacga

SEQ ID NO: 2056 - RNA, 20 nt, Homo sapiens
  source 1..20: mol_type = other RNA
aaagagcacttggtaatcgg

SEQ ID NO: 2057 - RNA, 20 nt, Homo sapiens
  source 1..20: mol_type = other RNA
aaaaatgcgcaaattcagcg

SEQ ID NO: 2058 - RNA, 20 nt, Homo sapiens
  source 1..20: mol_type = other RNA
tgatacctctgagcttacga

SEQ ID NO: 2059 - RNA, 20 nt, Homo sapiens
  source 1..20: mol_type = other RNA
gggaaataaacttaacacag

SEQ ID NO: 2060 - RNA, 20 nt, Homo sapiens
  source 1..20: mol_type = other RNA
attgaaagaaatcttggaca

SEQ ID NO: 2061 - RNA, 20 nt, Homo sapiens
  source 1..20: mol_type = other RNA
aggagtcaatatccataagg

SEQ ID NO: 2062 - RNA, 20 nt, Homo sapiens
  source 1..20: mol_type = other RNA
acagcattatcctgtagcgt

SEQ ID NO: 2063 - RNA, 20 nt, Homo sapiens
  source 1..20: mol_type = other RNA
gaatcagactgctgtatatg

SEQ ID NO: 2064 - RNA, 20 nt, Homo sapiens
  source 1..20: mol_type = other RNA
taaaaccatcgtaagctcag

SEQ ID NO: 2065 - RNA, 20 nt, Homo sapiens
  source 1..20: mol_type = other RNA
atcgtatttacccacgctac

SEQ ID NO: 2066 - RNA, 20 nt, Homo sapiens
  source 1..20: mol_type = other RNA
tacgttcgagaatatgctgt

SEQ ID NO: 2067 - RNA, 20 nt, Homo sapiens
  source 1..20: mol_type = other RNA
gcctaaactgcccccccggg

SEQ ID NO: 2068 - RNA, 20 nt, Homo sapiens
  source 1..20: mol_type = other RNA
aattactgctgtcaatcaag

SEQ ID NO: 2069 - RNA, 20 nt, Homo sapiens
  source 1..20: mol_type = other RNA
tagcttaccttatcgaaggg

SEQ ID NO: 2070 - RNA, 20 nt, Homo sapiens
  source 1..20: mol_type = other RNA
taattagcttaccttatcga

SEQ ID NO: 2071 - RNA, 20 nt, Homo sapiens
  source 1..20: mol_type = other RNA
agcttaccttatcgaaggga

SEQ ID NO: 2072 - RNA, 20 nt, Homo sapiens
  source 1..20: mol_type = other RNA
aattagcttaccttatcgaa

SEQ ID NO: 2073 - RNA, 20 nt, Homo sapiens
  source 1..20: mol_type = other RNA
ttctaataggaatctagaga

SEQ ID NO: 2074 - RNA, 20 nt, Homo sapiens
  source 1..20: mol_type = other RNA
aaaaacgtttgactattcat

SEQ ID NO: 2075 - RNA, 20 nt, Homo sapiens
  source 1..20: mol_type = other RNA
gacaagaagttgtgacccag

SEQ ID NO: 2076 - RNA, 20 nt, Homo sapiens
  source 1..20: mol_type = other RNA
gaagaaatgttgaatccaat

SEQ ID NO: 2077 - RNA, 20 nt, Homo sapiens
  source 1..20: mol_type = other RNA
cagcatattctcgaacgtac

SEQ ID NO: 2078 - RNA, 20 nt, Homo sapiens
  source 1..20: mol_type = other RNA
aagacaatcccacaagtgac

SEQ ID NO: 2079 - RNA, 20 nt, Homo sapiens
  source 1..20: mol_type = other RNA
tcgatttatggcagcctcta

SEQ ID NO: 2080 - RNA, 20 nt, Homo sapiens
  source 1..20: mol_type = other RNA
gagaatacgtcctccacatg

SEQ ID NO: 2081 - RNA, 20 nt, Homo sapiens
  source 1..20: mol_type = other RNA
actgtgaggtcggtgttccg

SEQ ID NO: 2082 - RNA, 20 nt, Homo sapiens
  source 1..20: mol_type = other RNA
cgtggccggccacggcaacg

SEQ ID NO: 2083 - RNA, 20 nt, Homo sapiens
  source 1..20: mol_type = other RNA
ctgaacctccagatctactg

SEQ ID NO: 2084 - RNA, 20 nt, Homo sapiens
  source 1..20: mol_type = other RNA
gagagggttaagtggatcag

SEQ ID NO: 2085 - RNA, 20 nt, Homo sapiens
  source 1..20: mol_type = other RNA
tggcggcggacttctaccac

SEQ ID NO: 2086 - RNA, 20 nt, Homo sapiens
  source 1..20: mol_type = other RNA
ccagcttcgcaagcaattgg

SEQ ID NO: 2087 - RNA, 20 nt, Homo sapiens
  source 1..20: mol_type = other RNA
gctctacgccatgcacccgt

SEQ ID NO: 2088 - RNA, 20 nt, Homo sapiens
  source 1..20: mol_type = other RNA
acacggtgaacacactctcg

SEQ ID NO: 2089 - RNA, 20 nt, Homo sapiens
  source 1..20: mol_type = other RNA
gtctgcaactaacccagaca

SEQ ID NO: 2090 - RNA, 20 nt, Homo sapiens
  source 1..20: mol_type = other RNA
cagatatctgccacatgtgg

SEQ ID NO: 2091 - RNA, 20 nt, Homo sapiens
  source 1..20: mol_type = other RNA
cccgtgcagtcatccaccag

SEQ ID NO: 2092 - RNA, 20 nt, Homo sapiens
  source 1..20: mol_type = other RNA
tcttccacaggtactccggg

SEQ ID NO: 2093 - RNA, 20 nt, Homo sapiens
  source 1..20: mol_type = other RNA
ctttaccgcagtagatctgg

SEQ ID NO: 2094 - RNA, 20 nt, Homo sapiens
  source 1..20: mol_type = other RNA
ttgcctctacaaaaactgtg

SEQ ID NO: 2095 - RNA, 20 nt, Homo sapiens
  source 1..20: mol_type = other RNA
agtccagacactatcagcag

SEQ ID NO: 2096 - RNA, 20 nt, Homo sapiens
  source 1..20: mol_type = other RNA
tccagacccggccctagacg

SEQ ID NO: 2097 - RNA, 20 nt, Homo sapiens
  source 1..20: mol_type = other RNA
gaacggagaagagattcacg

SEQ ID NO: 2098 - RNA, 20 nt, Homo sapiens
  source 1..20: mol_type = other RNA
ataccaattgttggccagaa

SEQ ID NO: 2099 - RNA, 20 nt, Homo sapiens
  source 1..20: mol_type = other RNA
cataccaattgttggccaga

SEQ ID NO: 2100 - RNA, 20 nt, Homo sapiens
  source 1..20: mol_type = other RNA
cagccccaaacccttcacag

SEQ ID NO: 2101 - RNA, 20 nt, Homo sapiens
  source 1..20: mol_type = other RNA
agctctacgccatgcacccg

SEQ ID NO: 2102 - RNA, 20 nt, Homo sapiens
  source 1..20: mol_type = other RNA
gctactggaaggccacgcac

SEQ ID NO: 2103 - RNA, 20 nt, Homo sapiens
  source 1..20: mol_type = other RNA
agtctgggatcaaagtgctt

SEQ ID NO: 2104 - RNA, 20 nt, Homo sapiens
  source 1..20: mol_type = other RNA
ggccaagaagaaatctctga

SEQ ID NO: 2105 - RNA, 20 nt, Homo sapiens
  source 1..20: mol_type = other RNA
cctgctgtcccggttcactg

SEQ ID NO: 2106 - RNA, 20 nt, Homo sapiens
  source 1..20: mol_type = other RNA
ctagcacttaccagaaactg

SEQ ID NO: 2107 - RNA, 20 nt, Homo sapiens
  source 1..20: mol_type = other RNA
cacctacttctacgccaatg

SEQ ID NO: 2108 - RNA, 20 nt, Homo sapiens
  source 1..20: mol_type = other RNA
ggcctcattggcgtagaagt

SEQ ID NO: 2109 - RNA, 20 nt, Homo sapiens
  source 1..20: mol_type = other RNA
agcgcaagaatgtctccatg

SEQ ID NO: 2110 - RNA, 20 nt, Homo sapiens
  source 1..20: mol_type = other RNA
cttggtagtccccaacgcac

SEQ ID NO: 2111 - RNA, 20 nt, Homo sapiens
  source 1..20: mol_type = other RNA
tattccaggcacgaataagc

SEQ ID NO: 2112 - RNA, 20 nt, Homo sapiens
  source 1..20: mol_type = other RNA
gtaccgcagccggcgaacct

SEQ ID NO: 2113 - RNA, 20 nt, Homo sapiens
  source 1..20: mol_type = other RNA
agatgaccaggatgctacag

SEQ ID NO: 2114 - RNA, 20 nt, Homo sapiens
  source 1..20: mol_type = other RNA
ctattccaggcacgaataag

SEQ ID NO: 2115 - RNA, 20 nt, Homo sapiens
  source 1..20: mol_type = other RNA
gtgggtcggccacggcagtg

SEQ ID NO: 2116 - RNA, 20 nt, Homo sapiens
  source 1..20: mol_type = other RNA
gaggtgttacctgtgcgttg

SEQ ID NO: 2117 - RNA, 20 nt, Homo sapiens
  source 1..20: mol_type = other RNA
gtgaaagaagcacctccact

SEQ ID NO: 2118 - RNA, 20 nt, Homo sapiens
  source 1..20: mol_type = other RNA
gttggggactaccaagtgct

SEQ ID NO: 2119 - RNA, 20 nt, Homo sapiens
  source 1..20: mol_type = other RNA
cattggcgtagaagtaggtg

SEQ ID NO: 2120 - RNA, 20 nt, Homo sapiens
  source 1..20: mol_type = other RNA
taagcgggacaagcaatacc

SEQ ID NO: 2121 - RNA, 20 nt, Homo sapiens
  source 1..20: mol_type = other RNA
ccaggaaacttctaggacag

SEQ ID NO: 2122 - RNA, 20 nt, Homo sapiens
  source 1..20: mol_type = other RNA
ctccactccatagtccagga

SEQ ID NO: 2123 - RNA, 20 nt, Homo sapiens
  source 1..20: mol_type = other RNA
gcggtccccgaaggcccagt

SEQ ID NO: 2124 - RNA, 20 nt, Homo sapiens
  source 1..20: mol_type = other RNA
acaggtagagtcagcgatga

SEQ ID NO: 2125 - RNA, 20 nt, Homo sapiens
  source 1..20: mol_type = other RNA
accattcctgcggtccccga

SEQ ID NO: 2126 - RNA, 20 nt, Homo sapiens
  source 1..20: mol_type = other RNA
aaagttgggcatcgcatcca

SEQ ID NO: 2127 - RNA, 20 nt, Homo sapiens
  source 1..20: mol_type = other RNA
cggctggaagtaggtctgct

SEQ ID NO: 2128 - RNA, 20 nt, Homo sapiens
  source 1..20: mol_type = other RNA
ctcccgcgagcagcccgcag

SEQ ID NO: 2129 - RNA, 20 nt, Homo sapiens
  source 1..20: mol_type = other RNA
ttgtcccgcttattcgtgcc

SEQ ID NO: 2130 - RNA, 20 nt, Homo sapiens
  source 1..20: mol_type = other RNA
cacaccgcagcatagcaccg

SEQ ID NO: 2131 - RNA, 20 nt, Homo sapiens
  source 1..20: mol_type = other RNA
ccctataggacacattcgag

SEQ ID NO: 2132 - RNA, 20 nt, Homo sapiens
  source 1..20: mol_type = other RNA
acagcccgtgagtgacgagt

SEQ ID NO: 2133 - RNA, 20 nt, Homo sapiens
  source 1..20: mol_type = other RNA
acacagccggagaaccagca

SEQ ID NO: 2134 - RNA, 20 nt, Homo sapiens
  source 1..20: mol_type = other RNA
ttcagaaggagctagcctcg

SEQ ID NO: 2135 - RNA, 20 nt, Homo sapiens
  source 1..20: mol_type = other RNA
gcgtggtatgaggggaacct

SEQ ID NO: 2136 - RNA, 20 nt, Homo sapiens
  source 1..20: mol_type = other RNA
tcgtaccagcttcactccga

SEQ ID NO: 2137 - RNA, 20 nt, Homo sapiens
  source 1..20: mol_type = other RNA
cctgtgccacccgatgcagg

SEQ ID NO: 2138 - RNA, 20 nt, Homo sapiens
  source 1..20: mol_type = other RNA
cagcccgtgagtgacgagtg

SEQ ID NO: 2139 - RNA, 20 nt, Homo sapiens
  source 1..20: mol_type = other RNA
actgcccatagacggatgct

SEQ ID NO: 2140 - RNA, 20 nt, Homo sapiens
  source 1..20: mol_type = other RNA
gcagtgaggcgtggtatgag

SEQ ID NO: 2141 - RNA, 20 nt, Homo sapiens
  source 1..20: mol_type = other RNA
tggtaggtgttccacaccca

SEQ ID NO: 2142 - RNA, 20 nt, Homo sapiens
  source 1..20: mol_type = other RNA
tcagaaggagctagcctcgt

SEQ ID NO: 2143 - RNA, 20 nt, Homo sapiens
  source 1..20: mol_type = other RNA
taggacacattcgagcggct

SEQ ID NO: 2144 - RNA, 20 nt, Homo sapiens
  source 1..20: mol_type = other RNA
agcccgtgagtgacgagtgg

SEQ ID NO: 2145 - RNA, 20 nt, Homo sapiens
  source 1..20: mol_type = other RNA
ctggtaggtgttccacaccc

SEQ ID NO: 2146 - RNA, 20 nt, Homo sapiens
  source 1..20: mol_type = other RNA
tcctggccttctgacccacg

SEQ ID NO: 2147 - RNA, 20 nt, Homo sapiens
  source 1..20: mol_type = other RNA
gctctcctgtgcccttaagg

SEQ ID NO: 2148 - RNA, 20 nt, Homo sapiens
  source 1..20: mol_type = other RNA
aacagcccgtgagtgacgag

SEQ ID NO: 2149 - RNA, 20 nt, Homo sapiens
  source 1..20: mol_type = other RNA
ggaacctcggtgctatgctg

SEQ ID NO: 2150 - RNA, 20 nt, Homo sapiens
  source 1..20: mol_type = other RNA
agggcacaggagagctgaca

SEQ ID NO: 2151 - RNA, 20 nt, Homo sapiens
  source 1..20: mol_type = other RNA
cagtccctgagctttgatgg

SEQ ID NO: 2152 - RNA, 20 nt, Homo sapiens
  source 1..20: mol_type = other RNA
cagcagtggtcggaggctga

SEQ ID NO: 2153 - RNA, 20 nt, Homo sapiens
  source 1..20: mol_type = other RNA
gctgttccagcgcacagcca

SEQ ID NO: 2154 - RNA, 20 nt, Homo sapiens
  source 1..20: mol_type = other RNA
tgaagctatggactctgggc

SEQ ID NO: 2155 - RNA, 20 nt, Homo sapiens
  source 1..20: mol_type = other RNA
gacaaaggacccttccgggt

SEQ ID NO: 2156 - RNA, 20 nt, Homo sapiens
  source 1..20: mol_type = other RNA
tacgctgccatgtatgacaa

SEQ ID NO: 2157 - RNA, 20 nt, Homo sapiens
  source 1..20: mol_type = other RNA
caggatactgaaagttcgca

SEQ ID NO: 2158 - RNA, 20 nt, Homo sapiens
  source 1..20: mol_type = other RNA
atttccagaaaggacatcac

SEQ ID NO: 2159 - RNA, 20 nt, Homo sapiens
  source 1..20: mol_type = other RNA
aaatgcagaatgccactctg

SEQ ID NO: 2160 - RNA, 20 nt, Homo sapiens
  source 1..20: mol_type = other RNA
gaatgacattcatgtccccg

SEQ ID NO: 2161 - RNA, 20 nt, Homo sapiens
  source 1..20: mol_type = other RNA
ctggaatatcacaaggtctg

SEQ ID NO: 2162 - RNA, 20 nt, Homo sapiens
  source 1..20: mol_type = other RNA
gcagtgctttccatcaccac

SEQ ID NO: 2163 - RNA, 20 nt, Homo sapiens
  source 1..20: mol_type = other RNA
aaccatccacctacccggaa

SEQ ID NO: 2164 - RNA, 20 nt, Homo sapiens
  source 1..20: mol_type = other RNA
ggactccaaaccactgcagg

SEQ ID NO: 2165 - RNA, 20 nt, Homo sapiens
  source 1..20: mol_type = other RNA
gctccatgtactctctgcaa

SEQ ID NO: 2166 - RNA, 20 nt, Homo sapiens
  source 1..20: mol_type = other RNA
gtgctttccatcaccactgg

SEQ ID NO: 2167 - RNA, 20 nt, Homo sapiens
  source 1..20: mol_type = other RNA
agggactccaaaccactgca

SEQ ID NO: 2168 - RNA, 20 nt, Homo sapiens
  source 1..20: mol_type = other RNA
ctctctgcaagggatccacg

SEQ ID NO: 2169 - RNA, 20 nt, Homo sapiens
  source 1..20: mol_type = other RNA
gattgaagttcatggcatag

SEQ ID NO: 2170 - RNA, 20 nt, Homo sapiens
  source 1..20: mol_type = other RNA
gtatgacaaaggacccttcc

SEQ ID NO: 2171 - RNA, 20 nt, Homo sapiens
  source 1..20: mol_type = other RNA
gaaccatccacctacccgga

SEQ ID NO: 2172 - RNA, 20 nt, Homo sapiens
  source 1..20: mol_type = other RNA
gcaggatactgaaagttcgc

SEQ ID NO: 2173 - RNA, 20 nt, Homo sapiens
  source 1..20: mol_type = other RNA
actctctgcaagggatccac

SEQ ID NO: 2174 - RNA, 20 nt, Homo sapiens
  source 1..20: mol_type = other RNA
accagcctttcagaatggca

SEQ ID NO: 2175 - RNA, 20 nt, Homo sapiens
  source 1..20: mol_type = other RNA
cttcaactatgccatgaagg

SEQ ID NO: 2176 - RNA, 20 nt, Homo sapiens
  source 1..20: mol_type = other RNA
gggactccaaaccactgcag

SEQ ID NO: 2177 - RNA, 20 nt, Homo sapiens
  source 1..20: mol_type = other RNA
agtggcattctgcatttctg

SEQ ID NO: 2178 - RNA, 20 nt, Homo sapiens
  source 1..20: mol_type = other RNA
taagccagaacagactcggc

SEQ ID NO: 2179 - RNA, 20 nt, Homo sapiens
  source 1..20: mol_type = other RNA
ccacaatatctgggctcaga

SEQ ID NO: 2180 - RNA, 20 nt, Homo sapiens
  source 1..20: mol_type = other RNA
tcagagtttcgaagcatgca

SEQ ID NO: 2181 - RNA, 20 nt, Homo sapiens
  source 1..20: mol_type = other RNA
acttcatatactctcattgg

SEQ ID NO: 2182 - RNA, 20 nt, Homo sapiens
  source 1..20: mol_type = other RNA
atgtataatcgaaagccagt

SEQ ID NO: 2183 - RNA, 20 nt, Homo sapiens
  source 1..20: mol_type = other RNA
tttcacaccagaaaactata

SEQ ID NO: 2184 - RNA, 20 nt, Homo sapiens
  source 1..20: mol_type = other RNA
gttatgcaaaatggagctgg

SEQ ID NO: 2185 - RNA, 20 nt, Homo sapiens
  source 1..20: mol_type = other RNA
agctggaggagctttatttg

SEQ ID NO: 2186 - RNA, 20 nt, Homo sapiens
  source 1..20: mol_type = other RNA
caccagaaaactataaggta

SEQ ID NO: 2187 - RNA, 20 nt, Homo sapiens
  source 1..20: mol_type = other RNA
gcccatctctgctatgaaca

SEQ ID NO: 2188 - RNA, 20 nt, Homo sapiens
  source 1..20: mol_type = other RNA
tgaaatcaaatggagtatca

SEQ ID NO: 2189 - RNA, 20 nt, Homo sapiens
  source 1..20: mol_type = other RNA
gcttgagcctccttacccag

SEQ ID NO: 2190 - RNA, 20 nt, Homo sapiens
  source 1..20: mol_type = other RNA
tagcccaaaggcagaatggg

SEQ ID NO: 2191 - RNA, 20 nt, Homo sapiens
  source 1..20: mol_type = other RNA
gtcagagtttcgaagcatgc

SEQ ID NO: 2192 - RNA, 20 nt, Homo sapiens
  source 1..20: mol_type = other RNA
cagtcctggatttagcccaa

SEQ ID NO: 2193 - RNA, 20 nt, Homo sapiens
  source 1..20: mol_type = other RNA
gagcctccttacccagtggg

SEQ ID NO: 2194 - RNA, 20 nt, Homo sapiens
  source 1..20: mol_type = other RNA
cattcagaaaaagcttggta

SEQ ID NO: 2195 - RNA, 20 nt, Homo sapiens
  source 1..20: mol_type = other RNA
ggctggcctcaccgcccact

SEQ ID NO: 2196 - RNA, 20 nt, Homo sapiens
  source 1..20: mol_type = other RNA
ccattcagaaaaagcttggt

SEQ ID NO: 2197 - RNA, 20 nt, Homo sapiens
  source 1..20: mol_type = other RNA
attgtaaaaaactatccaga

SEQ ID NO: 2198 - RNA, 20 nt, Homo sapiens
  source 1..20: mol_type = other RNA
gcctcaccgcccactgggta

SEQ ID NO: 2199 - RNA, 20 nt, Homo sapiens
  source 1..20: mol_type = other RNA
ggagtatcagggttattctc

SEQ ID NO: 2200 - RNA, 20 nt, Homo sapiens
  source 1..20: mol_type = other RNA
tctgcctttgggctaaatcc

SEQ ID NO: 2201 - RNA, 20 nt, Homo sapiens
  source 1..20: mol_type = other RNA
cttgagcctccttacccagt

SEQ ID NO: 2202 - RNA, 20 nt, Homo sapiens
  source 1..20: mol_type = other RNA
aaactctgacagcatactgg

SEQ ID NO: 2203 - RNA, 20 nt, Homo sapiens
  source 1..20: mol_type = other RNA
gctacttcatatactctcat

SEQ ID NO: 2204 - RNA, 20 nt, Homo sapiens
  source 1..20: mol_type = other RNA
gaagaacagctgctgcttta

SEQ ID NO: 2205 - RNA, 20 nt, Homo sapiens
  source 1..20: mol_type = other RNA
accgtgcattataacatggg

SEQ ID NO: 2206 - RNA, 20 nt, Homo sapiens
  source 1..20: mol_type = other RNA
catttctacgacaccgtgaa

SEQ ID NO: 2207 - RNA, 20 nt, Homo sapiens
  source 1..20: mol_type = other RNA
attgcacaccttatatggaa

SEQ ID NO: 2208 - RNA, 20 nt, Homo sapiens
  source 1..20: mol_type = other RNA
ataaggtgtgcaatagcgag

SEQ ID NO: 2209 - RNA, 20 nt, Homo sapiens
  source 1..20: mol_type = other RNA
tgtcatcgcactgtgcatag

SEQ ID NO: 2210 - RNA, 20 nt, Homo sapiens
  source 1..20: mol_type = other RNA
cccaccgtgcattataacat

SEQ ID NO: 2211 - RNA, 20 nt, Homo sapiens
  source 1..20: mol_type = other RNA
cgccaggtccttcgcgacag

SEQ ID NO: 2212 - RNA, 20 nt, Homo sapiens
  source 1..20: mol_type = other RNA
acaaactctaggtcctggca

SEQ ID NO: 2213 - RNA, 20 nt, Homo sapiens
  source 1..20: mol_type = other RNA
gcatttctacgacaccgtga

SEQ ID NO: 2214 - RNA, 20 nt, Homo sapiens
  source 1..20: mol_type = other RNA
atgactctggagatccgaga

SEQ ID NO: 2215 - RNA, 20 nt, Homo sapiens
  source 1..20: mol_type = other RNA
ggcagacgtgcagctgaagt

SEQ ID NO: 2216 - RNA, 20 nt, Homo sapiens
  source 1..20: mol_type = other RNA
ggatgccatccactacatga

SEQ ID NO: 2217 - RNA, 20 nt, Homo sapiens
  source 1..20: mol_type = other RNA
gcattcccaccaactacaag

SEQ ID NO: 2218 - RNA, 20 nt, Homo sapiens
  source 1..20: mol_type = other RNA
cgctggcgtggacgtcacga

SEQ ID NO: 2219 - RNA, 20 nt, Homo sapiens
  source 1..20: mol_type = other RNA
gcccatcacctcgaccacgg

SEQ ID NO: 2220 - RNA, 20 nt, Homo sapiens
  source 1..20: mol_type = other RNA
acgccaggtccttcgcgaca

SEQ ID NO: 2221 - RNA, 20 nt, Homo sapiens
  source 1..20: mol_type = other RNA
gcgatacgcccctgtcgcga

SEQ ID NO: 2222 - RNA, 20 nt, Homo sapiens
  source 1..20: mol_type = other RNA
gtcctgccctacctgtaggg

SEQ ID NO: 2223 - RNA, 20 nt, Homo sapiens
  source 1..20: mol_type = other RNA
tcactgttgatgggaacaag

SEQ ID NO: 2224 - RNA, 20 nt, Homo sapiens
  source 1..20: mol_type = other RNA
tattaaaccctgcctcagaa

SEQ ID NO: 2225 - RNA, 20 nt, Homo sapiens
  source 1..20: mol_type = other RNA
gccgcccatgttataatgca

SEQ ID NO: 2226 - RNA, 20 nt, Homo sapiens
  source 1..20: mol_type = other RNA
ttcagttccaccctacaggt

SEQ ID NO: 2227 - RNA, 20 nt, Homo sapiens
  source 1..20: mol_type = other RNA
tcgcactgtgcatagaggac

SEQ ID NO: 2228 - RNA, 20 nt, Homo sapiens
  source 1..20: mol_type = other RNA
cgcgtggccagctgctctgg

SEQ ID NO: 2229 - RNA, 20 nt, Homo sapiens
  source 1..20: mol_type = other RNA
cgtttagcagaactgaagat

SEQ ID NO: 2230 - RNA, 20 nt, Homo sapiens
  source 1..20: mol_type = other RNA
ttaaagcatccaataccatg

SEQ ID NO: 2231 - RNA, 20 nt, Homo sapiens
  source 1..20: mol_type = other RNA
atggcaaatttcttgatacg

SEQ ID NO: 2232 - RNA, 20 nt, Homo sapiens
  source 1..20: mol_type = other RNA
tgtgcaatgaacatcaatgg

SEQ ID NO: 2233 - RNA, 20 nt, Homo sapiens
  source 1..20: mol_type = other RNA
ctatcgatgggacccagaca

SEQ ID NO: 2234 - RNA, 20 nt, Homo sapiens
  source 1..20: mol_type = other RNA
tcctttatcacatacatgtg

SEQ ID NO: 2235 - RNA, 20 nt, Homo sapiens
  source 1..20: mol_type = other RNA
attaaagcatccaataccat

SEQ ID NO: 2236 - RNA, 20 nt, Homo sapiens
  source 1..20: mol_type = other RNA
gaaatttgccatctatcgat

SEQ ID NO: 2237 - RNA, 20 nt, Homo sapiens
  source 1..20: mol_type = other RNA
aaaaaatttcaggcctcccg

SEQ ID NO: 2238 - RNA, 20 nt, Homo sapiens
  source 1..20: mol_type = other RNA
acttcataagtctgcatatg

SEQ ID NO: 2239 - RNA, 20 nt, Homo sapiens
  source 1..20: mol_type = other RNA
tcacatacatgtgtggaaga

SEQ ID NO: 2240 - RNA, 20 nt, Homo sapiens
  source 1..20: mol_type = other RNA
acactctagcttgcacccga

SEQ ID NO: 2241 - RNA, 20 nt, Homo sapiens
  source 1..20: mol_type = other RNA
aagaaggatgaatctcagga

SEQ ID NO: 2242 - RNA, 20 nt, Homo sapiens
  source 1..20: mol_type = other RNA
agaaatttgccatctatcga

SEQ ID NO: 2243 - RNA, 20 nt, Homo sapiens
  source 1..20: mol_type = other RNA
tcttgtgcaatgaacatcaa

SEQ ID NO: 2244 - RNA, 20 nt, Homo sapiens
  source 1..20: mol_type = other RNA
ctgcaggcaggctccgccaa

SEQ ID NO: 2245 - RNA, 20 nt, Homo sapiens
  source 1..20: mol_type = other RNA
ttctctgcatgatcttcgga

SEQ ID NO: 2246 - RNA, 20 nt, Homo sapiens
  source 1..20: mol_type = other RNA
ttgccggccacaacccttgg

SEQ ID NO: 2247 - RNA, 20 nt, Homo sapiens
  source 1..20: mol_type = other RNA
gtctgggtcccatcgataga

SEQ ID NO: 2248 - RNA, 20 nt, Homo sapiens
  source 1..20: mol_type = other RNA
tagatgtggccccatggtat

SEQ ID NO: 2249 - RNA, 20 nt, Homo sapiens
  source 1..20: mol_type = other RNA
cggttgccggccacaaccct

SEQ ID NO: 2250 - RNA, 20 nt, Homo sapiens
  source 1..20: mol_type = other RNA
gctccgccaagggttgtggc

SEQ ID NO: 2251 - RNA, 20 nt, Homo sapiens
  source 1..20: mol_type = other RNA
gattgacaccaacctcaata

SEQ ID NO: 2252 - RNA, 20 nt, Homo sapiens
  source 1..20: mol_type = other RNA
tgagccttatttgaagaaga

SEQ ID NO: 2253 - RNA, 20 nt, Homo sapiens
  source 1..20: mol_type = other RNA
gatggcaaatttcttgatac

SEQ ID NO: 2254 - RNA, 20 nt, Homo sapiens
  source 1..20: mol_type = other RNA
catagaagagcgtgagaaac

SEQ ID NO: 2255 - RNA, 20 nt, Homo sapiens
  source 1..20: mol_type = other RNA
tacctgtagatagtaatgtg

SEQ ID NO: 2256 - RNA, 20 nt, Homo sapiens
  source 1..20: mol_type = other RNA
gccaaaaagagagacccctg

SEQ ID NO: 2257 - RNA, 20 nt, Homo sapiens
  source 1..20: mol_type = other RNA
cgaattaacttaccaagtgt

SEQ ID NO: 2258 - RNA, 20 nt, Homo sapiens
  source 1..20: mol_type = other RNA
atagtaatgtggggagacag

SEQ ID NO: 2259 - RNA, 20 nt, Homo sapiens
  source 1..20: mol_type = other RNA
taatgtggggagacagagga

SEQ ID NO: 2260 - RNA, 20 nt, Homo sapiens
  source 1..20: mol_type = other RNA
cggccaaagaagagatggag

SEQ ID NO: 2261 - RNA, 20 nt, Homo sapiens
  source 1..20: mol_type = other RNA
ctcttatcttgcagacacgt

SEQ ID NO: 2262 - RNA, 20 nt, Homo sapiens
  source 1..20: mol_type = other RNA
ttacctgtagatagtaatgt

SEQ ID NO: 2263 - RNA, 20 nt, Homo sapiens
  source 1..20: mol_type = other RNA
ctggaatgggatccgacact

SEQ ID NO: 2264 - RNA, 20 nt, Homo sapiens
  source 1..20: mol_type = other RNA
tgctgttcctttgggaacca

SEQ ID NO: 2265 - RNA, 20 nt, Homo sapiens
  source 1..20: mol_type = other RNA
tttcctaggtcccacatctg

SEQ ID NO: 2266 - RNA, 20 nt, Homo sapiens
  source 1..20: mol_type = other RNA
tctttggccgtggttcccaa

SEQ ID NO: 2267 - RNA, 20 nt, Homo sapiens
  source 1..20: mol_type = other RNA
tttgctttgtccacagatgt

SEQ ID NO: 2268 - RNA, 20 nt, Homo sapiens
  source 1..20: mol_type = other RNA
agatggctgcgctgttgctg

SEQ ID NO: 2269 - RNA, 20 nt, Homo sapiens
  source 1..20: mol_type = other RNA
ctccccacattactatctac

SEQ ID NO: 2270 - RNA, 20 nt, Homo sapiens
  source 1..20: mol_type = other RNA
cttacctgtagatagtaatg

SEQ ID NO: 2271 - RNA, 20 nt, Homo sapiens
  source 1..20: mol_type = other RNA
cacattactatctacaggta

SEQ ID NO: 2272 - RNA, 20 nt, Homo sapiens
  source 1..20: mol_type = other RNA
tgtcggccctgttactccct

SEQ ID NO: 2273 - RNA, 20 nt, Homo sapiens
  source 1..20: mol_type = other RNA
cggttctggaataagaatat

SEQ ID NO: 2274 - RNA, 20 nt, Homo sapiens
  source 1..20: mol_type = other RNA
ctccatctcttctttggccg

SEQ ID NO: 2275 - RNA, 20 nt, Homo sapiens
  source 1..20: mol_type = other RNA
aaccacggccaaagaagaga

SEQ ID NO: 2276 - RNA, 20 nt, Homo sapiens
  source 1..20: mol_type = other RNA
gaaccgctccatctcttctt

SEQ ID NO: 2277 - RNA, 20 nt, Homo sapiens
  source 1..20: mol_type = other RNA
agcaacagcgcagccatctt

SEQ ID NO: 2278 - RNA, 20 nt, Homo sapiens
  source 1..20: mol_type = other RNA
caagtgtcggatcccattcc

SEQ ID NO: 2279 - RNA, 20 nt, Homo sapiens
  source 1..20: mol_type = other RNA
cagcaacagcgcagccatct

SEQ ID NO: 2280 - RNA, 20 nt, Homo sapiens
  source 1..20: mol_type = other RNA
atggagagaacatacaatgg

SEQ ID NO: 2281 - RNA, 20 nt, Homo sapiens
  source 1..20: mol_type = other RNA
agttcgaagcaacagagctg

SEQ ID NO: 2282 - RNA, 20 nt, Homo sapiens
  source 1..20: mol_type = other RNA
tctgttgcttcgaactccag

SEQ ID NO: 2283 - RNA, 20 nt, Homo sapiens
  source 1..20: mol_type = other RNA
gagaacatacaatggtggct

SEQ ID NO: 2284 - RNA, 20 nt, Homo sapiens
  source 1..20: mol_type = other RNA
aggaccgacctatcccagaa

SEQ ID NO: 2285 - RNA, 20 nt, Homo sapiens
  source 1..20: mol_type = other RNA
gccgtttgcggtgccctagg

SEQ ID NO: 2286 - RNA, 20 nt, Homo sapiens
  source 1..20: mol_type = other RNA
acgagatggcggttctctgg

SEQ ID NO: 2287 - RNA, 20 nt, Homo sapiens
  source 1..20: mol_type = other RNA
tgttactgactatgttcatg

SEQ ID NO: 2288 - RNA, 20 nt, Homo sapiens
  source 1..20: mol_type = other RNA
tgccttgcagaaagctgcca

SEQ ID NO: 2289 - RNA, 20 nt, Homo sapiens
  source 1..20: mol_type = other RNA
gaatagtccatcgcagagca

SEQ ID NO: 2290 - RNA, 20 nt, Homo sapiens
  source 1..20: mol_type = other RNA
ccagtgaccatgaagagtga

SEQ ID NO: 2291 - RNA, 20 nt, Homo sapiens
  source 1..20: mol_type = other RNA
agaaatgctgagatatgagc

SEQ ID NO: 2292 - RNA, 20 nt, Homo sapiens
  source 1..20: mol_type = other RNA
cgacctatcccagaatggtg

SEQ ID NO: 2293 - RNA, 20 nt, Homo sapiens
  source 1..20: mol_type = other RNA
tgcggtgccctaggaggccg

SEQ ID NO: 2294 - RNA, 20 nt, Homo sapiens
  source 1..20: mol_type = other RNA
actccacaccattctgggat

SEQ ID NO: 2295 - RNA, 20 nt, Homo sapiens
  source 1..20: mol_type = other RNA
ctctccactggactagcgag

SEQ ID NO: 2296 - RNA, 20 nt, Homo sapiens
  source 1..20: mol_type = other RNA
agtgccgtttgcggtgccct

SEQ ID NO: 2297 - RNA, 20 nt, Homo sapiens
  source 1..20: mol_type = other RNA
ctctgcgatggactattccc

SEQ ID NO: 2298 - RNA, 20 nt, Homo sapiens
  source 1..20: mol_type = other RNA
gcctcctagggcaccgcaaa

SEQ ID NO: 2299 - RNA, 20 nt, Homo sapiens
  source 1..20: mol_type = other RNA
agccctcaggaacgagatgg

SEQ ID NO: 2300 - RNA, 20 nt, Homo sapiens
  source 1..20: mol_type = other RNA
tggaggctgagtgccgtttg

SEQ ID NO: 2301 - RNA, 20 nt, Homo sapiens
  source 1..20: mol_type = other RNA
tatttcaactatcacgatgt

SEQ ID NO: 2302 - RNA, 20 nt, Homo sapiens
  source 1..20: mol_type = other RNA
tgccttggcagctttctgca

SEQ ID NO: 2303 - RNA, 20 nt, Homo sapiens
  source 1..20: mol_type = other RNA
tttgctcctgggtctgcttc

SEQ ID NO: 2304 - RNA, 20 nt, Homo sapiens
  source 1..20: mol_type = other RNA
acccctcacctcggcctcct

SEQ ID NO: 2305 - RNA, 20 nt, Homo sapiens
  source 1..20: mol_type = other RNA
agctatccgtggtctcaccg

SEQ ID NO: 2306 - RNA, 20 nt, Homo sapiens
  source 1..20: mol_type = other RNA
ggtgggcgtgtgctacacgg

SEQ ID NO: 2307 - RNA, 20 nt, Homo sapiens
  source 1..20: mol_type = other RNA
aaggccagacttcgacgaca

SEQ ID NO: 2308 - RNA, 20 nt, Homo sapiens
  source 1..20: mol_type = other RNA
ggtgagaccacggatagctg

SEQ ID NO: 2309 - RNA, 20 nt, Homo sapiens
  source 1..20: mol_type = other RNA
tagctcgcacgatgtagctg

SEQ ID NO: 2310 - RNA, 20 nt, Homo sapiens
  source 1..20: mol_type = other RNA
tgagaccacggatagctggg

SEQ ID NO: 2311 - RNA, 20 nt, Homo sapiens
  source 1..20: mol_type = other RNA
gtgagaccacggatagctgg

SEQ ID NO: 2312 - RNA, 20 nt, Homo sapiens
  source 1..20: mol_type = other RNA
tggcaggtggaggttcaaga

SEQ ID NO: 2313 - RNA, 20 nt, Homo sapiens
  source 1..20: mol_type = other RNA
tcagctacatcgtgcgagct

SEQ ID NO: 2314 - RNA, 20 nt, Homo sapiens
  source 1..20: mol_type = other RNA
tggtgtggtccaaggaagag

SEQ ID NO: 2315 - RNA, 20 nt, Homo sapiens
  source 1..20: mol_type = other RNA
aaaaccataccccaacagtg

SEQ ID NO: 2316 - RNA, 20 nt, Homo sapiens
  source 1..20: mol_type = other RNA
tgcacccccccagctatccg

SEQ ID NO: 2317 - RNA, 20 nt, Homo sapiens
  source 1..20: mol_type = other RNA
tcgaagtctggcctttcccg

SEQ ID NO: 2318 - RNA, 20 nt, Homo sapiens
  source 1..20: mol_type = other RNA
acgatgtagctgaggtcagg

SEQ ID NO: 2319 - RNA, 20 nt, Homo sapiens
  source 1..20: mol_type = other RNA
gggagatgttcatgcggcca

SEQ ID NO: 2320 - RNA, 20 nt, Homo sapiens
  source 1..20: mol_type = other RNA
aggaggccacggtgagacca

SEQ ID NO: 2321 - RNA, 20 nt, Homo sapiens
  source 1..20: mol_type = other RNA
gagaccacggatagctgggg

SEQ ID NO: 2322 - RNA, 20 nt, Homo sapiens
  source 1..20: mol_type = other RNA
tagtcctcaccaccatgcct

SEQ ID NO: 2323 - RNA, 20 nt, Homo sapiens
  source 1..20: mol_type = other RNA
catggatctggtcctaggca

SEQ ID NO: 2324 - RNA, 20 nt, Homo sapiens
  source 1..20: mol_type = other RNA
tgcacacctggtgtggtcca

SEQ ID NO: 2325 - RNA, 20 nt, Homo sapiens
  source 1..20: mol_type = other RNA
tcactttccggcctcgggaa

SEQ ID NO: 2326 - RNA, 20 nt, Homo sapiens
  source 1..20: mol_type = other RNA
gggtttccaggtatataagc

SEQ ID NO: 2327 - RNA, 20 nt, Homo sapiens
  source 1..20: mol_type = other RNA
aagacggccccaatgaagat

SEQ ID NO: 2328 - RNA, 20 nt, Homo sapiens
  source 1..20: mol_type = other RNA
gctggccatggctctgcatt

SEQ ID NO: 2329 - RNA, 20 nt, Homo sapiens
  source 1..20: mol_type = other RNA
gcgcgctgcacagcagaccc

SEQ ID NO: 2330 - RNA, 20 nt, Homo sapiens
  source 1..20: mol_type = other RNA
aggacggatcagacgaagag

SEQ ID NO: 2331 - RNA, 20 nt, Homo sapiens
  source 1..20: mol_type = other RNA
ttaggacggatcagacgaag

SEQ ID NO: 2332 - RNA, 20 nt, Homo sapiens
  source 1..20: mol_type = other RNA
gctcgcatctgctatagtgg

SEQ ID NO: 2333 - RNA, 20 nt, Homo sapiens
  source 1..20: mol_type = other RNA
accttcttcgaccccgccgg

SEQ ID NO: 2334 - RNA, 20 nt, Homo sapiens
  source 1..20: mol_type = other RNA
gaagatggttaggtctacgg

SEQ ID NO: 2335 - RNA, 20 nt, Homo sapiens
  source 1..20: mol_type = other RNA
ccagctcggctcgaataagg

SEQ ID NO: 2336 - RNA, 20 nt, Homo sapiens
  source 1..20: mol_type = other RNA
ataggtgttggtatagaatg

SEQ ID NO: 2337 - RNA, 20 nt, Homo sapiens
  source 1..20: mol_type = other RNA
tggggtctcctcctccggcg

SEQ ID NO: 2338 - RNA, 20 nt, Homo sapiens
  source 1..20: mol_type = other RNA
tcgggggcaccgattattag

SEQ ID NO: 2339 - RNA, 20 nt, Homo sapiens
  source 1..20: mol_type = other RNA
tccggcggggtcgaagaagg

SEQ ID NO: 2340 - RNA, 20 nt, Homo sapiens
  source 1..20: mol_type = other RNA
aggtgtctcctctatcttag

SEQ ID NO: 2341 - RNA, 20 nt, Homo sapiens
  source 1..20: mol_type = other RNA
accaccttcttcgaccccgc

SEQ ID NO: 2342 - RNA, 20 nt, Homo sapiens
  source 1..20: mol_type = other RNA
attgatggcccctaagatag

SEQ ID NO: 2343 - RNA, 20 nt, Homo sapiens
  source 1..20: mol_type = other RNA
gtaatacccatcataatcgg

SEQ ID NO: 2344 - RNA, 20 nt, Homo sapiens
  source 1..20: mol_type = other RNA
ataatcatcgctatccccac

SEQ ID NO: 2345 - RNA, 20 nt, Homo sapiens
  source 1..20: mol_type = other RNA
gcggggaaacgccatatcgg

SEQ ID NO: 2346 - RNA, 20 nt, Homo sapiens
  source 1..20: mol_type = other RNA
tgacgataacgttgtagatg

SEQ ID NO: 2347 - RNA, 20 nt, Homo sapiens
  source 1..20: mol_type = other RNA
ggaggcttagagctgtgcct

SEQ ID NO: 2348 - RNA, 20 nt, Homo sapiens
  source 1..20: mol_type = other RNA
ctgggagagataggagaagt

SEQ ID NO: 2349 - RNA, 20 nt, Homo sapiens
  source 1..20: mol_type = other RNA
aatggggtctcctcctccgg

SEQ ID NO: 2350 - RNA, 20 nt, Homo sapiens
  source 1..20: mol_type = other RNA
agctgactcgccacactcca

SEQ ID NO: 2351 - RNA, 20 nt, Homo sapiens
  source 1..20: mol_type = other RNA
taaatactttgacgccggtg

SEQ ID NO: 2352 - RNA, 20 nt, Homo sapiens
  source 1..20: mol_type = other RNA
gcatctgctatagtggaggc

SEQ ID NO: 2353 - RNA, 20 nt, Homo sapiens
  source 1..20: mol_type = other RNA
ggagacacctgctaggtgta

SEQ ID NO: 2354 - RNA, 20 nt, Homo sapiens
  source 1..20: mol_type = other RNA
accatacctatgtatccaaa

SEQ ID NO: 2355 - RNA, 20 nt, Homo sapiens
  source 1..20: mol_type = other RNA
attcctcgaccactaggaca

SEQ ID NO: 2356 - RNA, 20 nt, Homo sapiens
  source 1..20: mol_type = other RNA
tgcatgtaccaattccgcaa

SEQ ID NO: 2357 - RNA, 20 nt, Homo sapiens
  source 1..20: mol_type = other RNA
caaataccgagtcttcggat

SEQ ID NO: 2358 - RNA, 20 nt, Homo sapiens
  source 1..20: mol_type = other RNA
atttatacagatcctccaag

SEQ ID NO: 2359 - RNA, 20 nt, Homo sapiens
  source 1..20: mol_type = other RNA
tttcaccgaacgaagatact

SEQ ID NO: 2360 - RNA, 20 nt, Homo sapiens
  source 1..20: mol_type = other RNA
caatgtagtgacgataatgt

SEQ ID NO: 2361 - RNA, 20 nt, Homo sapiens
  source 1..20: mol_type = other RNA
aagtgttagcccatagacct

SEQ ID NO: 2362 - RNA, 20 nt, Homo sapiens
  source 1..20: mol_type = other RNA
atctgcttatgctttctaag

SEQ ID NO: 2363 - RNA, 20 nt, Homo sapiens
  source 1..20: mol_type = other RNA
tccacagccgaatgtgaatg

SEQ ID NO: 2364 - RNA, 20 nt, Homo sapiens
  source 1..20: mol_type = other RNA
tattaccaaagaacacattg

SEQ ID NO: 2365 - RNA, 20 nt, Homo sapiens
  source 1..20: mol_type = other RNA
gaaaaccgagtatcttcgtt

SEQ ID NO: 2366 - RNA, 20 nt, Homo sapiens
  source 1..20: mol_type = other RNA
attagaattcctcgaccact

SEQ ID NO: 2367 - RNA, 20 nt, Homo sapiens
  source 1..20: mol_type = other RNA
agagcacagctggtcccttg

SEQ ID NO: 2368 - RNA, 20 nt, Homo sapiens
  source 1..20: mol_type = other RNA
aatgtagtgacgataatgta

SEQ ID NO: 2369 - RNA, 20 nt, Homo sapiens
  source 1..20: mol_type = other RNA
tgacgataatgtaggggtaa

SEQ ID NO: 2370 - RNA, 20 nt, Homo sapiens
  source 1..20: mol_type = other RNA
ggataacattacgttagtga

SEQ ID NO: 2371 - RNA, 20 nt, Homo sapiens
  source 1..20: mol_type = other RNA
aattcctcgaccactaggac

SEQ ID NO: 2372 - RNA, 20 nt, Homo sapiens
  source 1..20: mol_type = other RNA
attcaacccatccgaagact

SEQ ID NO: 2373 - RNA, 20 nt, Homo sapiens
  source 1..20: mol_type = other RNA
cagaaggaggtctgaatgtg

SEQ ID NO: 2374 - RNA, 20 nt, Homo sapiens
  source 1..20: mol_type = other RNA
ctgcatgtaccaattccgca

SEQ ID NO: 2375 - RNA, 20 nt, Homo sapiens
  source 1..20: mol_type = other RNA
tcaaataccgagtcttcgga

SEQ ID NO: 2376 - RNA, 20 nt, Homo sapiens
  source 1..20: mol_type = other RNA
agcccgtctgatggacgatg

SEQ ID NO: 2377 - RNA, 20 nt, Homo sapiens
  source 1..20: mol_type = other RNA
tacaaatggcaatcacagtg

SEQ ID NO: 2378 - RNA, 20 nt, Homo sapiens
  source 1..20: mol_type = other RNA
tggggtccccaccaacatga

SEQ ID NO: 2379 - RNA, 20 nt, Homo sapiens
  source 1..20: mol_type = other RNA
aagccctcatggaaaagatg

SEQ ID NO: 2380 - RNA, 20 nt, Homo sapiens
  source 1..20: mol_type = other RNA
caggttgtctactcgcccag

SEQ ID NO: 2381 - RNA, 20 nt, Homo sapiens
  source 1..20: mol_type = other RNA
gatgccacagccaaacacga

SEQ ID NO: 2382 - RNA, 20 nt, Homo sapiens
  source 1..20: mol_type = other RNA
ggacccgttgaacaactctg

SEQ ID NO: 2383 - RNA, 20 nt, Homo sapiens
  source 1..20: mol_type = other RNA
gccacagccaaacacgaagg

SEQ ID NO: 2384 - RNA, 20 nt, Homo sapiens
  source 1..20: mol_type = other RNA
gggctccaggatgtcagctg

SEQ ID NO: 2385 - RNA, 20 nt, Homo sapiens
  source 1..20: mol_type = other RNA
gtaagaacactgatggcggg

SEQ ID NO: 2386 - RNA, 20 nt, Homo sapiens
  source 1..20: mol_type = other RNA
ttacctggtaggctcccaca

SEQ ID NO: 2387 - RNA, 20 nt, Homo sapiens
  source 1..20: mol_type = other RNA
agaagctggtaaagtagtca

SEQ ID NO: 2388 - RNA, 20 nt, Homo sapiens
  source 1..20: mol_type = other RNA
ctctgggcgagtagacaacc

SEQ ID NO: 2389 - RNA, 20 nt, Homo sapiens
  source 1..20: mol_type = other RNA
ggatgaggggacgtcccagg

SEQ ID NO: 2390 - RNA, 20 nt, Homo sapiens
  source 1..20: mol_type = other RNA
ccaggtaagaacactgatgg

SEQ ID NO: 2391 - RNA, 20 nt, Homo sapiens
  source 1..20: mol_type = other RNA
tcaacaagttgctggcgcat

SEQ ID NO: 2392 - RNA, 20 nt, Homo sapiens
  source 1..20: mol_type = other RNA
cagggaccaagtgtgctcgc

SEQ ID NO: 2393 - RNA, 20 nt, Homo sapiens
  source 1..20: mol_type = other RNA
acagagcagccccccaagca

SEQ ID NO: 2394 - RNA, 20 nt, Homo sapiens
  source 1..20: mol_type = other RNA
tctgcagaaactcggccatg

SEQ ID NO: 2395 - RNA, 20 nt, Homo sapiens
  source 1..20: mol_type = other RNA
caggtaagaacactgatggc

SEQ ID NO: 2396 - RNA, 20 nt, Homo sapiens
  source 1..20: mol_type = other RNA
tgaagaccggcgagcacact

SEQ ID NO: 2397 - RNA, 20 nt, Homo sapiens
  source 1..20: mol_type = other RNA
agggacccgttgaacaactc

SEQ ID NO: 2398 - RNA, 20 nt, Homo sapiens
  source 1..20: mol_type = other RNA
ccatcagcgcctccacgtcg

SEQ ID NO: 2399 - RNA, 20 nt, Homo sapiens
  source 1..20: mol_type = other RNA
ggccgccgcttacctctccg

SEQ ID NO: 2400 - RNA, 20 nt, Homo sapiens
  source 1..20: mol_type = other RNA
gggacccgttgaacaactct

SEQ ID NO: 2401 - RNA, 20 nt, Homo sapiens
  source 1..20: mol_type = other RNA
ccaagcttacctcctccacg

SEQ ID NO: 2402 - RNA, 20 nt, Homo sapiens
  source 1..20: mol_type = other RNA
atggccgagtttctgcagac

SEQ ID NO: 2403 - RNA, 20 nt, Homo sapiens
  source 1..20: mol_type = other RNA
ttaccccagagttgttcaac

SEQ ID NO: 2404 - RNA, 20 nt, Homo sapiens
  source 1..20: mol_type = other RNA
gagagcctgctgcgggatga

SEQ ID NO: 2405 - RNA, 20 nt, Homo sapiens
  source 1..20: mol_type = other RNA
cctctatccagaaaacacgg

SEQ ID NO: 2406 - RNA, 20 nt, Homo sapiens
  source 1..20: mol_type = other RNA
agcattaaaggactgactga

SEQ ID NO: 2407 - RNA, 20 nt, Homo sapiens
  source 1..20: mol_type = other RNA
tatctccaaactcatgaaca

SEQ ID NO: 2408 - RNA, 20 nt, Homo sapiens
  source 1..20: mol_type = other RNA
agaatcttcaatagacacat

SEQ ID NO: 2409 - RNA, 20 nt, Homo sapiens
  source 1..20: mol_type = other RNA
ggaaagtaatggaccagtga

SEQ ID NO: 2410 - RNA, 20 nt, Homo sapiens
  source 1..20: mol_type = other RNA
ttggagataatacagcaggt

SEQ ID NO: 2411 - RNA, 20 nt, Homo sapiens
  source 1..20: mol_type = other RNA
catcatcaatttcgagcaga

SEQ ID NO: 2412 - RNA, 20 nt, Homo sapiens
  source 1..20: mol_type = other RNA
ctctatccagaaaacacggt

SEQ ID NO: 2413 - RNA, 20 nt, Homo sapiens
  source 1..20: mol_type = other RNA
taatggaccagtgaaggtgt

SEQ ID NO: 2414 - RNA, 20 nt, Homo sapiens
  source 1..20: mol_type = other RNA
gtgggccaaaggatgaagag

SEQ ID NO: 2415 - RNA, 20 nt, Homo sapiens
  source 1..20: mol_type = other RNA
taaataggctgtaccagtgc

SEQ ID NO: 2416 - RNA, 20 nt, Homo sapiens
  source 1..20: mol_type = other RNA
aatcctctatccagaaaaca

SEQ ID NO: 2417 - RNA, 20 nt, Homo sapiens
  source 1..20: mol_type = other RNA
catgaacatggaatccatgc

SEQ ID NO: 2418 - RNA, 20 nt, Homo sapiens
  source 1..20: mol_type = other RNA
aattgatgatgccctgcact

SEQ ID NO: 2419 - RNA, 20 nt, Homo sapiens
  source 1..20: mol_type = other RNA
aatgtgactgctgacaaaga

SEQ ID NO: 2420 - RNA, 20 nt, Homo sapiens
  source 1..20: mol_type = other RNA
aatggaccagtgaaggtgtg

SEQ ID NO: 2421 - RNA, 20 nt, Homo sapiens
  source 1..20: mol_type = other RNA
tcaatttcgagcagaaggca

SEQ ID NO: 2422 - RNA, 20 nt, Homo sapiens
  source 1..20: mol_type = other RNA
gactgctgacaaagatggtg

SEQ ID NO: 2423 - RNA, 20 nt, Homo sapiens
  source 1..20: mol_type = other RNA
gagtttggagataatacagc

SEQ ID NO: 2424 - RNA, 20 nt, Homo sapiens
  source 1..20: mol_type = other RNA
aaggtgtggggaagcattaa

SEQ ID NO: 2425 - RNA, 20 nt, Homo sapiens
  source 1..20: mol_type = other RNA
ctggatagaggattaaagtg

SEQ ID NO: 2426 - RNA, 20 nt, Homo sapiens
  source 1..20: mol_type = other RNA
ggattccatgttcatgagtt

SEQ ID NO: 2427 - RNA, 20 nt, Homo sapiens
  source 1..20: mol_type = other RNA
gtaatggaccagtgaaggtg

SEQ ID NO: 2428 - RNA, 20 nt, Homo sapiens
  source 1..20: mol_type = other RNA
aaattgatgatgccctgcac

SEQ ID NO: 2429 - RNA, 20 nt, Homo sapiens
  source 1..20: mol_type = other RNA
attaggcatgttggagactt

SEQ ID NO: 2430 - RNA, 20 nt, Homo sapiens
  source 1..20: mol_type = other RNA
acaaacctcagccctaacgg

SEQ ID NO: 2431 - RNA, 20 nt, Homo sapiens
  source 1..20: mol_type = other RNA
atgatctgcgcgttgatgtg

SEQ ID NO: 2432 - RNA, 20 nt, Homo sapiens
  source 1..20: mol_type = other RNA
gacgttcaggttgttcacgt

SEQ ID NO: 2433 - RNA, 20 nt, Homo sapiens
  source 1..20: mol_type = other RNA
gaacaacctgaacgtcaccg

SEQ ID NO: 2434 - RNA, 20 nt, Homo sapiens
  source 1..20: mol_type = other RNA
gaagccatcaaacgtgactt

SEQ ID NO: 2435 - RNA, 20 nt, Homo sapiens
  source 1..20: mol_type = other RNA
ggttgttcacgtaggccgcg

SEQ ID NO: 2436 - RNA, 20 nt, Homo sapiens
  source 1..20: mol_type = other RNA
ccaccattgaacttcagtgc

SEQ ID NO: 2437 - RNA, 20 nt, Homo sapiens
  source 1..20: mol_type = other RNA
tccagggcgccgtagtcgta

SEQ ID NO: 2438 - RNA, 20 nt, Homo sapiens
  source 1..20: mol_type = other RNA
cctgcactgaagttcaatgg

SEQ ID NO: 2439 - RNA, 20 nt, Homo sapiens
  source 1..20: mol_type = other RNA
tggacaaacctcagccctaa

SEQ ID NO: 2440 - RNA, 20 nt, Homo sapiens
  source 1..20: mol_type = other RNA
gtggtggagaacccaaaggt

SEQ ID NO: 2441 - RNA, 20 nt, Homo sapiens
  source 1..20: mol_type = other RNA
aagctgacggctgcatctgt

SEQ ID NO: 2442 - RNA, 20 nt, Homo sapiens
  source 1..20: mol_type = other RNA
cccgacctgccctacgacta

SEQ ID NO: 2443 - RNA, 20 nt, Homo sapiens
  source 1..20: mol_type = other RNA
gcaccacagcaagcaccacg

SEQ ID NO: 2444 - RNA, 20 nt, Homo sapiens
  source 1..20: mol_type = other RNA
gggcgccgtagtcgtagggc

SEQ ID NO: 2445 - RNA, 20 nt, Homo sapiens
  source 1..20: mol_type = other RNA
gcactgaagttcaatggtgg

SEQ ID NO: 2446 - RNA, 20 nt, Homo sapiens
  source 1..20: mol_type = other RNA
ctcagcctggaacctaccct

SEQ ID NO: 2447 - RNA, 20 nt, Homo sapiens
  source 1..20: mol_type = other RNA
ggagaagtaccaggaggcgt

SEQ ID NO: 2448 - RNA, 20 nt, Homo sapiens
  source 1..20: mol_type = other RNA
aggaggcgttggccaagggt

SEQ ID NO: 2449 - RNA, 20 nt, Homo sapiens
  source 1..20: mol_type = other RNA
caccaatatataccaacctt

SEQ ID NO: 2450 - RNA, 20 nt, Homo sapiens
  source 1..20: mol_type = other RNA
caccgaggagaagtaccagg

SEQ ID NO: 2451 - RNA, 20 nt, Homo sapiens
  source 1..20: mol_type = other RNA
gccctacgactacggcgccc

SEQ ID NO: 2452 - RNA, 20 nt, Homo sapiens
  source 1..20: mol_type = other RNA
caagtttaaggagaagctga

SEQ ID NO: 2453 - RNA, 20 nt, Homo sapiens
  source 1..20: mol_type = other RNA
agtcgtagggcaggtcgggg

SEQ ID NO: 2454 - RNA, 20 nt, Homo sapiens
  source 1..20: mol_type = other RNA
gagcccagataccccaaaac

SEQ ID NO: 2455 - RNA, 20 nt, Homo sapiens
  source 1..20: mol_type = other RNA
aggacgacgccggtcacccg

SEQ ID NO: 2456 - RNA, 20 nt, Homo sapiens
  source 1..20: mol_type = other RNA
gatccgagacatgtacgcca

SEQ ID NO: 2457 - RNA, 20 nt, Homo sapiens
  source 1..20: mol_type = other RNA
agacatgtacgccaaggtca

SEQ ID NO: 2458 - RNA, 20 nt, Homo sapiens
  source 1..20: mol_type = other RNA
ctgccggaagaggacgacgc

SEQ ID NO: 2459 - RNA, 20 nt, Homo sapiens
  source 1..20: mol_type = other RNA
cgggccccactacaacccgc

SEQ ID NO: 2460 - RNA, 20 nt, Homo sapiens
  source 1..20: mol_type = other RNA
ggcggagcccaactctgact

SEQ ID NO: 2461 - RNA, 20 nt, Homo sapiens
  source 1..20: mol_type = other RNA
catccacgtgcaccagttcg

SEQ ID NO: 2462 - RNA, 20 nt, Homo sapiens
  source 1..20: mol_type = other RNA
aaggcgtcgagcttggcgcg

SEQ ID NO: 2463 - RNA, 20 nt, Homo sapiens
  source 1..20: mol_type = other RNA
cgaagttgccgaagtcgccc

SEQ ID NO: 2464 - RNA, 20 nt, Homo sapiens
  source 1..20: mol_type = other RNA
acggccagcgggttgtagtg

SEQ ID NO: 2465 - RNA, 20 nt, Homo sapiens
  source 1..20: mol_type = other RNA
atgcagcggcgggacgacga

SEQ ID NO: 2466 - RNA, 20 nt, Homo sapiens
  source 1..20: mol_type = other RNA
ctcgcccgtccaggcgtccg

SEQ ID NO: 2467 - RNA, 20 nt, Homo sapiens
  source 1..20: mol_type = other RNA
ggcaacttcgcggtccgcga

SEQ ID NO: 2468 - RNA, 20 nt, Homo sapiens
  source 1..20: mol_type = other RNA
ggtccccgaactggtgcacg

SEQ ID NO: 2469 - RNA, 20 nt, Homo sapiens
  source 1..20: mol_type = other RNA
tggagctgttcggctcggtc

SEQ ID NO: 2470 - RNA, 20 nt, Homo sapiens
  source 1..20: mol_type = other RNA
ggcgaagaaggcgtcgagct

SEQ ID NO: 2471 - RNA, 20 nt, Homo sapiens
  source 1..20: mol_type = other RNA
gaagccctccagggcgaaga

SEQ ID NO: 2472 - RNA, 20 nt, Homo sapiens
  source 1..20: mol_type = other RNA
ggagcccaactctgactcgg

SEQ ID NO: 2473 - RNA, 20 nt, Homo sapiens
  source 1..20: mol_type = other RNA
ggcaggaggtcatgcagcgg

SEQ ID NO: 2474 - RNA, 20 nt, Homo sapiens
  source 1..20: mol_type = other RNA
tgaccttggcgtacatgtct

SEQ ID NO: 2475 - RNA, 20 nt, Homo sapiens
  source 1..20: mol_type = other RNA
ctggacgggcgaggactcgg

SEQ ID NO: 2476 - RNA, 20 nt, Homo sapiens
  source 1..20: mol_type = other RNA
acctccagaggctgccgtcg

SEQ ID NO: 2477 - RNA, 20 nt, Homo sapiens
  source 1..20: mol_type = other RNA
atggcgcggctggagctgtt

SEQ ID NO: 2478 - RNA, 20 nt, Homo sapiens
  source 1..20: mol_type = other RNA
gccagggctgcgagtccacc

SEQ ID NO: 2479 - RNA, 20 nt, Homo sapiens
  source 1..20: mol_type = other RNA
gcgaagttgccgaagtcgcc

SEQ ID NO: 2480 - RNA, 20 nt, Homo sapiens
  source 1..20: mol_type = other RNA
ccacttgttaacagagaccg

SEQ ID NO: 2481 - RNA, 20 nt, Homo sapiens
  source 1..20: mol_type = other RNA
tgagagactccagttgccag

SEQ ID NO: 2482 - RNA, 20 nt, Homo sapiens
  source 1..20: mol_type = other RNA
cttgtggcgctgaaaacgaa

SEQ ID NO: 2483 - RNA, 20 nt, Homo sapiens
  source 1..20: mol_type = other RNA
tgccacttctcagtacatgt

SEQ ID NO: 2484 - RNA, 20 nt, Homo sapiens
  source 1..20: mol_type = other RNA
agttgtactgaagtccactt

SEQ ID NO: 2485 - RNA, 20 nt, Homo sapiens
  source 1..20: mol_type = other RNA
gaggcaattgccgtcacctg

SEQ ID NO: 2486 - RNA, 20 nt, Homo sapiens
  source 1..20: mol_type = other RNA
tgtcatagccgagaacaatg

SEQ ID NO: 2487 - RNA, 20 nt, Homo sapiens
  source 1..20: mol_type = other RNA
ccccggtctctgttaacaag

SEQ ID NO: 2488 - RNA, 20 nt, Homo sapiens
  source 1..20: mol_type = other RNA
tatgccatgagtgctcagag

SEQ ID NO: 2489 - RNA, 20 nt, Homo sapiens
  source 1..20: mol_type = other RNA
gacacacccatggcccgaag

SEQ ID NO: 2490 - RNA, 20 nt, Homo sapiens
  source 1..20: mol_type = other RNA
aaccatgcaccgatacacac

SEQ ID NO: 2491 - RNA, 20 nt, Homo sapiens
  source 1..20: mol_type = other RNA
tcaactggtgtcgagaagtc

SEQ ID NO: 2492 - RNA, 20 nt, Homo sapiens
  source 1..20: mol_type = other RNA
gccacttctcagtacatgtg

SEQ ID NO: 2493 - RNA, 20 nt, Homo sapiens
  source 1..20: mol_type = other RNA
tcctcagggttccacgccaa

SEQ ID NO: 2494 - RNA, 20 nt, Homo sapiens
  source 1..20: mol_type = other RNA
gctgtcatagccgagaacaa

SEQ ID NO: 2495 - RNA, 20 nt, Homo sapiens
  source 1..20: mol_type = other RNA
tgttaacaagtggaacagct

SEQ ID NO: 2496 - RNA, 20 nt, Homo sapiens
  source 1..20: mol_type = other RNA
ctttgctatgatactcgggt

SEQ ID NO: 2497 - RNA, 20 nt, Homo sapiens
  source 1..20: mol_type = other RNA
ctcaggaatttgttgaaacg

SEQ ID NO: 2498 - RNA, 20 nt, Homo sapiens
  source 1..20: mol_type = other RNA
agaaatccccgtccaaggct

SEQ ID NO: 2499 - RNA, 20 nt, Homo sapiens
  source 1..20: mol_type = other RNA
ggcaggaaaacagcgagcag

SEQ ID NO: 2500 - RNA, 20 nt, Homo sapiens
  source 1..20: mol_type = other RNA
gcactcatggcataaaggct

SEQ ID NO: 2501 - RNA, 20 nt, Homo sapiens
  source 1..20: mol_type = other RNA
tcactgaacagaaaagggct

SEQ ID NO: 2502 - RNA, 20 nt, Homo sapiens
  source 1..20: mol_type = other RNA
aattccacccactttcaaag

SEQ ID NO: 2503 - RNA, 20 nt, Homo sapiens
  source 1..20: mol_type = other RNA
cgggatccaagtgccttgtg

SEQ ID NO: 2504 - RNA, 20 nt, Homo sapiens
  source 1..20: mol_type = other RNA
tgatgagatgagttgtgcca

SEQ ID NO: 2505 - RNA, 20 nt, Homo sapiens
  source 1..20: mol_type = other RNA
ccattgttcaatatcgtccg

SEQ ID NO: 2506 - RNA, 20 nt, Homo sapiens
  source 1..20: mol_type = other RNA
gagcgctgctcagatagcga

SEQ ID NO: 2507 - RNA, 20 nt, Homo sapiens
  source 1..20: mol_type = other RNA
tcctcagcatcttatccgag

SEQ ID NO: 2508 - RNA, 20 nt, Homo sapiens
  source 1..20: mol_type = other RNA
agtggaaggaaatttgcgtg

SEQ ID NO: 2509 - RNA, 20 nt, Homo sapiens
  source 1..20: mol_type = other RNA
gcagtcacagcacatgacgg

SEQ ID NO: 2510 - RNA, 20 nt, Homo sapiens
  source 1..20: mol_type = other RNA
ccccggacgatattgaacaa

SEQ ID NO: 2511 - RNA, 20 nt, Homo sapiens
  source 1..20: mol_type = other RNA
aaatcatccattgcttggga

SEQ ID NO: 2512 - RNA, 20 nt, Homo sapiens
  source 1..20: mol_type = other RNA
atgtgtaacagttcctgcat

SEQ ID NO: 2513 - RNA, 20 nt, Homo sapiens
  source 1..20: mol_type = other RNA
ggtgccctatgagccgcctg

SEQ ID NO: 2514 - RNA, 20 nt, Homo sapiens
  source 1..20: mol_type = other RNA
tcggataagatgctgaggag

SEQ ID NO: 2515 - RNA, 20 nt, Homo sapiens
  source 1..20: mol_type = other RNA
ccagttgcaaaccagacctc

SEQ ID NO: 2516 - RNA, 20 nt, Homo sapiens
  source 1..20: mol_type = other RNA
agcacatgacggaggttgtg

SEQ ID NO: 2517 - RNA, 20 nt, Homo sapiens
  source 1..20: mol_type = other RNA
tccactcggataagatgctg

SEQ ID NO: 2518 - RNA, 20 nt, Homo sapiens
  source 1..20: mol_type = other RNA
aatcaacccacagctgcaca

SEQ ID NO: 2519 - RNA, 20 nt, Homo sapiens
  source 1..20: mol_type = other RNA
gaaaccgtagctgccctggt

SEQ ID NO: 2520 - RNA, 20 nt, Homo sapiens
  source 1..20: mol_type = other RNA
accattgttcaatatcgtcc

SEQ ID NO: 2521 - RNA, 20 nt, Homo sapiens
  source 1..20: mol_type = other RNA
tccattgcttgggacggcaa

SEQ ID NO: 2522 - RNA, 20 nt, Homo sapiens
  source 1..20: mol_type = other RNA
gccagaggctgctccccccg

SEQ ID NO: 2523 - RNA, 20 nt, Homo sapiens
  source 1..20: mol_type = other RNA
cagaatgcaagaagcccaga

SEQ ID NO: 2524 - RNA, 20 nt, Homo sapiens
  source 1..20: mol_type = other RNA
gttgcaaaccagacctcagg

SEQ ID NO: 2525 - RNA, 20 nt, Homo sapiens
  source 1..20: mol_type = other RNA
accagcagctcctacaccgg

SEQ ID NO: 2526 - RNA, 20 nt, Homo sapiens
  source 1..20: mol_type = other RNA
ccttcccagaaaacctacca

SEQ ID NO: 2527 - RNA, 20 nt, Homo sapiens
  source 1..20: mol_type = other RNA
gatccactcacagtttccat

SEQ ID NO: 2528 - RNA, 20 nt, Homo sapiens
  source 1..20: mol_type = other RNA
tgtaacagttcctgcatggg

SEQ ID NO: 2529 - RNA, 20 nt, Homo sapiens
  source 1..20: mol_type = other RNA
ccagacctcaggcggctcat

SEQ ID NO: 2530 - RNA, 20 nt, Homo sapiens
  source 1..20: mol_type = other RNA
acagcatagacagacatgct

SEQ ID NO: 2531 - RNA, 20 nt, Homo sapiens
  source 1..20: mol_type = other RNA
tggattaaccactatcaagg

SEQ ID NO: 2532 - RNA, 20 nt, Homo sapiens
  source 1..20: mol_type = other RNA
tatgtaattcatcagtccca

SEQ ID NO: 2533 - RNA, 20 nt, Homo sapiens
  source 1..20: mol_type = other RNA
atgtaattcatcagtcccac

SEQ ID NO: 2534 - RNA, 20 nt, Homo sapiens
  source 1..20: mol_type = other RNA
atccacctgcagtaaaacat

SEQ ID NO: 2535 - RNA, 20 nt, Homo sapiens
  source 1..20: mol_type = other RNA
gtttgagtcatgtccaatgg

SEQ ID NO: 2536 - RNA, 20 nt, Homo sapiens
  source 1..20: mol_type = other RNA
tacgatctagatacttgcac

SEQ ID NO: 2537 - RNA, 20 nt, Homo sapiens
  source 1..20: mol_type = other RNA
tgactcaaactggagaaagc

SEQ ID NO: 2538 - RNA, 20 nt, Homo sapiens
  source 1..20: mol_type = other RNA
taattcatcagtcccacggg

SEQ ID NO: 2539 - RNA, 20 nt, Homo sapiens
  source 1..20: mol_type = other RNA
cgggtggcctcactgagacc

SEQ ID NO: 2540 - RNA, 20 nt, Homo sapiens
  source 1..20: mol_type = other RNA
taacgtacctgggactactt

SEQ ID NO: 2541 - RNA, 20 nt, Homo sapiens
  source 1..20: mol_type = other RNA
tacatagcccaagtagtccc

SEQ ID NO: 2542 - RNA, 20 nt, Homo sapiens
  source 1..20: mol_type = other RNA
ccacctgcagtaaaacatgg

SEQ ID NO: 2543 - RNA, 20 nt, Homo sapiens
  source 1..20: mol_type = other RNA
ccagtttgagtcatgtccaa

SEQ ID NO: 2544 - RNA, 20 nt, Homo sapiens
  source 1..20: mol_type = other RNA
ccattggacatgactcaaac

SEQ ID NO: 2545 - RNA, 20 nt, Homo sapiens
  source 1..20: mol_type = other RNA
ctcctgccctggtctcagtg

SEQ ID NO: 2546 - RNA, 20 nt, Homo sapiens
  source 1..20: mol_type = other RNA
cacagcatagacagacatgc

SEQ ID NO: 2547 - RNA, 20 nt, Homo sapiens
  source 1..20: mol_type = other RNA
caaggtggaaacaagtccta

SEQ ID NO: 2548 - RNA, 20 nt, Homo sapiens
  source 1..20: mol_type = other RNA
ctgcagtaaaacatgggggt

SEQ ID NO: 2549 - RNA, 20 nt, Homo sapiens
  source 1..20: mol_type = other RNA
ctcaagagatgccggtaaac

SEQ ID NO: 2550 - RNA, 20 nt, Homo sapiens
  source 1..20: mol_type = other RNA
gtaaacaggaaaagactgaa

SEQ ID NO: 2551 - RNA, 20 nt, Homo sapiens
  source 1..20: mol_type = other RNA
aagactgaagggtgctcagt

SEQ ID NO: 2552 - RNA, 20 nt, Homo sapiens
  source 1..20: mol_type = other RNA
ggtaaacaggaaaagactga

SEQ ID NO: 2553 - RNA, 20 nt, Homo sapiens
  source 1..20: mol_type = other RNA
gggtggcctcactgagacca

SEQ ID NO: 2554 - RNA, 20 nt, Homo sapiens
  source 1..20: mol_type = other RNA
attgaattctggttcttggt

SEQ ID NO: 2555 - RNA, 20 nt, Homo sapiens
  source 1..20: mol_type = other RNA
aaggtagagcatcatcacgg

SEQ ID NO: 2556 - RNA, 20 nt, Homo sapiens
  source 1..20: mol_type = other RNA
gcacacagcttactacatca

SEQ ID NO: 2557 - RNA, 20 nt, Homo sapiens
  source 1..20: mol_type = other RNA
atgtccatgggatgccaccg

SEQ ID NO: 2558 - RNA, 20 nt, Homo sapiens
  source 1..20: mol_type = other RNA
caaaaggtagagcatcatca

SEQ ID NO: 2559 - RNA, 20 nt, Homo sapiens
  source 1..20: mol_type = other RNA
aggaacgtgatgtgatcctg

SEQ ID NO: 2560 - RNA, 20 nt, Homo sapiens
  source 1..20: mol_type = other RNA
gggccttgtaatgtgtgctg

SEQ ID NO: 2561 - RNA, 20 nt, Homo sapiens
  source 1..20: mol_type = other RNA
gaagcggcatggagtaagag

SEQ ID NO: 2562 - RNA, 20 nt, Homo sapiens
  source 1..20: mol_type = other RNA
acattacaaggcccctcgaa

SEQ ID NO: 2563 - RNA, 20 nt, Homo sapiens
  source 1..20: mol_type = other RNA
ctgtccaaggatctgccgaa

SEQ ID NO: 2564 - RNA, 20 nt, Homo sapiens
  source 1..20: mol_type = other RNA
catcccatggacatatgcag

SEQ ID NO: 2565 - RNA, 20 nt, Homo sapiens
  source 1..20: mol_type = other RNA
tgatgcatctatgcgagatg

SEQ ID NO: 2566 - RNA, 20 nt, Homo sapiens
  source 1..20: mol_type = other RNA
ggtgctgtaggcattaagat

SEQ ID NO: 2567 - RNA, 20 nt, Homo sapiens
  source 1..20: mol_type = other RNA
ccccaactcaccgtgcaagt

SEQ ID NO: 2568 - RNA, 20 nt, Homo sapiens
  source 1..20: mol_type = other RNA
gcagtcatagtggccgatga

SEQ ID NO: 2569 - RNA, 20 nt, Homo sapiens
  source 1..20: mol_type = other RNA
aagcggcatggagtaagagt

SEQ ID NO: 2570 - RNA, 20 nt, Homo sapiens
  source 1..20: mol_type = other RNA
agttctgcacaatgtcaccc

SEQ ID NO: 2571 - RNA, 20 nt, Homo sapiens
  source 1..20: mol_type = other RNA
ctctactgcaatggccacgt

SEQ ID NO: 2572 - RNA, 20 nt, Homo sapiens
  source 1..20: mol_type = other RNA
tcttaatgcctacagcaccc

SEQ ID NO: 2573 - RNA, 20 nt, Homo sapiens
  source 1..20: mol_type = other RNA
tgctgccagcaccattcgag

SEQ ID NO: 2574 - RNA, 20 nt, Homo sapiens
  source 1..20: mol_type = other RNA
tgagactgagaagaataatg

SEQ ID NO: 2575 - RNA, 20 nt, Homo sapiens
  source 1..20: mol_type = other RNA
cttgcaaggccacattgtcc

SEQ ID NO: 2576 - RNA, 20 nt, Homo sapiens
  source 1..20: mol_type = other RNA
ctgctgccagcaccattcga

SEQ ID NO: 2577 - RNA, 20 nt, Homo sapiens
  source 1..20: mol_type = other RNA
cagggaacaaagaatcggcc

SEQ ID NO: 2578 - RNA, 20 nt, Homo sapiens
  source 1..20: mol_type = other RNA
gaaggttgccgtactccgca

SEQ ID NO: 2579 - RNA, 20 nt, Homo sapiens
  source 1..20: mol_type = other RNA
cctgggctagaggtgtgccc

SEQ ID NO: 2580 - RNA, 20 nt, Homo sapiens
  source 1..20: mol_type = other RNA
agttagtgggactaacctca

SEQ ID NO: 2581 - RNA, 20 nt, Homo sapiens
  source 1..20: mol_type = other RNA
ggactaacctcaaggtcctg

SEQ ID NO: 2582 - RNA, 20 nt, Homo sapiens
  source 1..20: mol_type = other RNA
gccacaacctcaggaccttg

SEQ ID NO: 2583 - RNA, 20 nt, Homo sapiens
  source 1..20: mol_type = other RNA
tcaaggtcctgaggttgtgg

SEQ ID NO: 2584 - RNA, 20 nt, Homo sapiens
  source 1..20: mol_type = other RNA
gaaatgtacttacgagtctg

SEQ ID NO: 2585 - RNA, 20 nt, Homo sapiens
  source 1..20: mol_type = other RNA
ggtgcaaaggccaactaccg

SEQ ID NO: 2586 - RNA, 20 nt, Homo sapiens
  source 1..20: mol_type = other RNA
taaagcaggcagtagatatg

SEQ ID NO: 2587 - RNA, 20 nt, Homo sapiens
  source 1..20: mol_type = other RNA
gtacttacacatcaccccgc

SEQ ID NO: 2588 - RNA, 20 nt, Homo sapiens
  source 1..20: mol_type = other RNA
tgtaagacgcagcaaatggg

SEQ ID NO: 2589 - RNA, 20 nt, Homo sapiens
  source 1..20: mol_type = other RNA
gaacagtttctcaacatgag

SEQ ID NO: 2590 - RNA, 20 nt, Homo sapiens
  source 1..20: mol_type = other RNA
tgaacagtttctcaacatga

SEQ ID NO: 2591 - RNA, 20 nt, Homo sapiens
  source 1..20: mol_type = other RNA
tgaacgaagtaatgtaactg

SEQ ID NO: 2592 - RNA, 20 nt, Homo sapiens
  source 1..20: mol_type = other RNA
gattcagtgtgaccgcaaca

SEQ ID NO: 2593 - RNA, 20 nt, Homo sapiens
  source 1..20: mol_type = other RNA
acaatacaagggattagcca

SEQ ID NO: 2594 - RNA, 20 nt, Homo sapiens
  source 1..20: mol_type = other RNA
gctttgtcaatctttagctg

SEQ ID NO: 2595 - RNA, 20 nt, Homo sapiens
  source 1..20: mol_type = other RNA
gcaaaggccaactaccgtgg

SEQ ID NO: 2596 - RNA, 20 nt, Homo sapiens
  source 1..20: mol_type = other RNA
attcagtgtgaccgcaacaa

SEQ ID NO: 2597 - RNA, 20 nt, Homo sapiens
  source 1..20: mol_type = other RNA
taccaagttaccaaatggct

SEQ ID NO: 2598 - RNA, 20 nt, Homo sapiens
  source 1..20: mol_type = other RNA
gaagcaatcaccaagccatt

SEQ ID NO: 2599 - RNA, 20 nt, Homo sapiens
  source 1..20: mol_type = other RNA
agtttctcaacatgaggggt

SEQ ID NO: 2600 - RNA, 20 nt, Homo sapiens
  source 1..20: mol_type = other RNA
tcatctttcaagataacccg

SEQ ID NO: 2601 - RNA, 20 nt, Homo sapiens
  source 1..20: mol_type = other RNA
gattggaaaagtgacatcag

SEQ ID NO: 2602 - RNA, 20 nt, Homo sapiens
  source 1..20: mol_type = other RNA
ggaaaacatggcttatactg

SEQ ID NO: 2603 - RNA, 20 nt, Homo sapiens
  source 1..20: mol_type = other RNA
tgacatgtggcccagcaccg

SEQ ID NO: 2604 - RNA, 20 nt, Homo sapiens
  source 1..20: mol_type = other RNA
tcagcaacttgctttagaac

SEQ ID NO: 2605 - RNA, 20 nt, Homo sapiens
  source 1..20: mol_type = other RNA
aaatacaaaaacctggaacg

SEQ ID NO: 2606 - RNA, 20 nt, Homo sapiens
  source 1..20: mol_type = other RNA
atggcaatgtgtcctatgct

SEQ ID NO: 2607 - RNA, 20 nt, Homo sapiens
  source 1..20: mol_type = other RNA
accaaacagcatacagacga

SEQ ID NO: 2608 - RNA, 20 nt, Homo sapiens
  source 1..20: mol_type = other RNA
cggccaaaatctgaattctg

SEQ ID NO: 2609 - RNA, 20 nt, Homo sapiens
  source 1..20: mol_type = other RNA
atttcatcacatattgaagt

SEQ ID NO: 2610 - RNA, 20 nt, Homo sapiens
  source 1..20: mol_type = other RNA
ccacaccctgaatctcactc

SEQ ID NO: 2611 - RNA, 20 nt, Homo sapiens
  source 1..20: mol_type = other RNA
gactgtcagaatgcccatca

SEQ ID NO: 2612 - RNA, 20 nt, Homo sapiens
  source 1..20: mol_type = other RNA
acttaccaaatacaaaaacc

SEQ ID NO: 2613 - RNA, 20 nt, Homo sapiens
  source 1..20: mol_type = other RNA
tgtgttccacttaccctgat

SEQ ID NO: 2614 - RNA, 20 nt, Homo sapiens
  source 1..20: mol_type = other RNA
ctcaaggtgtatcagggcaa

SEQ ID NO: 2615 - RNA, 20 nt, Homo sapiens
  source 1..20: mol_type = other RNA
tgtcctatgcttggtacaga

SEQ ID NO: 2616 - RNA, 20 nt, Homo sapiens
  source 1..20: mol_type = other RNA
ttgagaaaccccgcctacag

SEQ ID NO: 2617 - RNA, 20 nt, Homo sapiens
  source 1..20: mol_type = other RNA
gaacttgagtcttctcatca

SEQ ID NO: 2618 - RNA, 20 nt, Homo sapiens
  source 1..20: mol_type = other RNA
ataggacacattgccatccc

SEQ ID NO: 2619 - RNA, 20 nt, Homo sapiens
  source 1..20: mol_type = other RNA
ctcccgagatgctaaccaca

SEQ ID NO: 2620 - RNA, 20 nt, Homo sapiens
  source 1..20: mol_type = other RNA
gtgtcctatgcttggtacag

SEQ ID NO: 2621 - RNA, 20 nt, Homo sapiens
  source 1..20: mol_type = other RNA
gcaagctgatccagacagca

SEQ ID NO: 2622 - RNA, 20 nt, Homo sapiens
  source 1..20: mol_type = other RNA
gttgagaaaccccgcctaca

SEQ ID NO: 2623 - RNA, 20 nt, Homo sapiens
  source 1..20: mol_type = other RNA
ctatcattggaagtattgga

SEQ ID NO: 2624 - RNA, 20 nt, Homo sapiens
  source 1..20: mol_type = other RNA
gtgtgttccacttaccctga

SEQ ID NO: 2625 - RNA, 20 nt, Homo sapiens
  source 1..20: mol_type = other RNA
gctccctctgtaccaagcat

SEQ ID NO: 2626 - RNA, 20 nt, Homo sapiens
  source 1..20: mol_type = other RNA
aggggaagatcctggacaga

SEQ ID NO: 2627 - RNA, 20 nt, Homo sapiens
  source 1..20: mol_type = other RNA
cctcacctacctggacgagg

SEQ ID NO: 2628 - RNA, 20 nt, Homo sapiens
  source 1..20: mol_type = other RNA
agaagcaggcaagggtgcca

SEQ ID NO: 2629 - RNA, 20 nt, Homo sapiens
  source 1..20: mol_type = other RNA
gtgtggctttcccagctaac

SEQ ID NO: 2630 - RNA, 20 nt, Homo sapiens
  source 1..20: mol_type = other RNA
gtggcatggcaggactacgt

SEQ ID NO: 2631 - RNA, 20 nt, Homo sapiens
  source 1..20: mol_type = other RNA
cgtaccgcatgtcctcaaag

SEQ ID NO: 2632 - RNA, 20 nt, Homo sapiens
  source 1..20: mol_type = other RNA
ggacacgcccagcttcaagt

SEQ ID NO: 2633 - RNA, 20 nt, Homo sapiens
  source 1..20: mol_type = other RNA
gcagctcccatattcccctg

SEQ ID NO: 2634 - RNA, 20 nt, Homo sapiens
  source 1..20: mol_type = other RNA
gcgagtacttcgttccaaca

SEQ ID NO: 2635 - RNA, 20 nt, Homo sapiens
  source 1..20: mol_type = other RNA
aaccttagatcccccgacaa

SEQ ID NO: 2636 - RNA, 20 nt, Homo sapiens
  source 1..20: mol_type = other RNA
ctggagtgacatgcgacagg

SEQ ID NO: 2637 - RNA, 20 nt, Homo sapiens
  source 1..20: mol_type = other RNA
ttggacagcccaagacatcg

SEQ ID NO: 2638 - RNA, 20 nt, Homo sapiens
  source 1..20: mol_type = other RNA
gccctacagtgatcccagcg

SEQ ID NO: 2639 - RNA, 20 nt, Homo sapiens
  source 1..20: mol_type = other RNA
aacaggctactacctgacct

SEQ ID NO: 2640 - RNA, 20 nt, Homo sapiens
  source 1..20: mol_type = other RNA
aatgcagagaaagctatctg

SEQ ID NO: 2641 - RNA, 20 nt, Homo sapiens
  source 1..20: mol_type = other RNA
accaggtcatcaccccatag

SEQ ID NO: 2642 - RNA, 20 nt, Homo sapiens
  source 1..20: mol_type = other RNA
gagagtgacacgctgaccat

SEQ ID NO: 2643 - RNA, 20 nt, Homo sapiens
  source 1..20: mol_type = other RNA
gtggacccttactcccgcag

SEQ ID NO: 2644 - RNA, 20 nt, Homo sapiens
  source 1..20: mol_type = other RNA
tattctctctacacaccaca

SEQ ID NO: 2645 - RNA, 20 nt, Homo sapiens
  source 1..20: mol_type = other RNA
ccatgccacacacaggacgt

SEQ ID NO: 2646 - RNA, 20 nt, Homo sapiens
  source 1..20: mol_type = other RNA
cacgatcaggctgaacacaa

SEQ ID NO: 2647 - RNA, 20 nt, Homo sapiens
  source 1..20: mol_type = other RNA
gctgtgtctcgtattgtctg

SEQ ID NO: 2648 - RNA, 20 nt, Homo sapiens
  source 1..20: mol_type = other RNA
gcaatgcagacaaacacagc

SEQ ID NO: 2649 - RNA, 20 nt, Homo sapiens
  source 1..20: mol_type = other RNA
aaccccagagtccttaccga

SEQ ID NO: 2650 - RNA, 20 nt, Homo sapiens
  source 1..20: mol_type = other RNA
catgccacacacaggacgta

SEQ ID NO: 2651 - RNA, 20 nt, Homo sapiens
  source 1..20: mol_type = other RNA
ctgctgctgaaataccgaca

SEQ ID NO: 2652 - RNA, 20 nt, Homo sapiens
  source 1..20: mol_type = other RNA
acccggtcaggattgacctg

SEQ ID NO: 2653 - RNA, 20 nt, Homo sapiens
  source 1..20: mol_type = other RNA
gcccggctggtggaagacat

SEQ ID NO: 2654 - RNA, 20 nt, Homo sapiens
  source 1..20: mol_type = other RNA
acttgtagagttgtcataga

SEQ ID NO: 2655 - RNA, 20 nt, Homo sapiens
  source 1..20: mol_type = other RNA
acccacggctacaaagcgca

SEQ ID NO: 2656 - RNA, 20 nt, Homo sapiens
  source 1..20: mol_type = other RNA
gctcggctatggaccacacg

SEQ ID NO: 2657 - RNA, 20 nt, Homo sapiens
  source 1..20: mol_type = other RNA
gtaccagggcactttgcgaa

SEQ ID NO: 2658 - RNA, 20 nt, Homo sapiens
  source 1..20: mol_type = other RNA
tgctcggctatggaccacac

SEQ ID NO: 2659 - RNA, 20 nt, Homo sapiens
  source 1..20: mol_type = other RNA
ctggacacagtgacactatg

SEQ ID NO: 2660 - RNA, 20 nt, Homo sapiens
  source 1..20: mol_type = other RNA
ccccaatgccccattccaca

SEQ ID NO: 2661 - RNA, 20 nt, Homo sapiens
  source 1..20: mol_type = other RNA
tggctggccactaccccgtg

SEQ ID NO: 2662 - RNA, 20 nt, Homo sapiens
  source 1..20: mol_type = other RNA
ccacagacacattggtctgt

SEQ ID NO: 2663 - RNA, 20 nt, Homo sapiens
  source 1..20: mol_type = other RNA
cgtaccagggcactttgcga

SEQ ID NO: 2664 - RNA, 20 nt, Homo sapiens
  source 1..20: mol_type = other RNA
cggctacaaagcgcagggca

SEQ ID NO: 2665 - RNA, 20 nt, Homo sapiens
  source 1..20: mol_type = other RNA
actctaagatctccaagcgc

SEQ ID NO: 2666 - RNA, 20 nt, Homo sapiens
  source 1..20: mol_type = other RNA
gccacagacacattggtctg

SEQ ID NO: 2667 - RNA, 20 nt, Homo sapiens
  source 1..20: mol_type = other RNA
ctatggaccacacggggtag

SEQ ID NO: 2668 - RNA, 20 nt, Homo sapiens
  source 1..20: mol_type = other RNA
gtcagagaatacgtcctcaa

SEQ ID NO: 2669 - RNA, 20 nt, Homo sapiens
  source 1..20: mol_type = other RNA
gcaggcggtagaaagggctg

SEQ ID NO: 2670 - RNA, 20 nt, Homo sapiens
  source 1..20: mol_type = other RNA
gccggaaaccatgaccacct

SEQ ID NO: 2671 - RNA, 20 nt, Homo sapiens
  source 1..20: mol_type = other RNA
tttccggctagcacgtacca

SEQ ID NO: 2672 - RNA, 20 nt, Homo sapiens
  source 1..20: mol_type = other RNA
agacttcatcctgtctctag

SEQ ID NO: 2673 - RNA, 20 nt, Homo sapiens
  source 1..20: mol_type = other RNA
gatcttagagtatgcaatct

SEQ ID NO: 2674 - RNA, 20 nt, Homo sapiens
  source 1..20: mol_type = other RNA
ccaatgccaaggagatcgct

SEQ ID NO: 2675 - RNA, 20 nt, Homo sapiens
  source 1..20: mol_type = other RNA
cccacagaccaatgtgtctg

SEQ ID NO: 2676 - RNA, 20 nt, Homo sapiens
  source 1..20: mol_type = other RNA
gtttccggctagcacgtacc

SEQ ID NO: 2677 - RNA, 20 nt, Homo sapiens
  source 1..20: mol_type = other RNA
gtgctcggctatggaccaca

SEQ ID NO: 2678 - RNA, 20 nt, Homo sapiens
  source 1..20: mol_type = other RNA
tggccatttcccgggccgtg

SEQ ID NO: 2679 - RNA, 20 nt, Homo sapiens
  source 1..20: mol_type = other RNA
ctggctcaagaaacagctgg

SEQ ID NO: 2680 - RNA, 20 nt, Homo sapiens
  source 1..20: mol_type = other RNA
ttcttgtagggtgaacaccg

SEQ ID NO: 2681 - RNA, 20 nt, Homo sapiens
  source 1..20: mol_type = other RNA
aggcaatcaacacctctctg

SEQ ID NO: 2682 - RNA, 20 nt, Homo sapiens
  source 1..20: mol_type = other RNA
cgttctccccaatcaagaca

SEQ ID NO: 2683 - RNA, 20 nt, Homo sapiens
  source 1..20: mol_type = other RNA
acaggtttgactagcgaact

SEQ ID NO: 2684 - RNA, 20 nt, Homo sapiens
  source 1..20: mol_type = other RNA
ctacttgcctccagtaccag

SEQ ID NO: 2685 - RNA, 20 nt, Homo sapiens
  source 1..20: mol_type = other RNA
ttgagtgtatgcacaaattg

SEQ ID NO: 2686 - RNA, 20 nt, Homo sapiens
  source 1..20: mol_type = other RNA
ttctgagatgcacgcccctg

SEQ ID NO: 2687 - RNA, 20 nt, Homo sapiens
  source 1..20: mol_type = other RNA
ccacagcacatgatctgtct

SEQ ID NO: 2688 - RNA, 20 nt, Homo sapiens
  source 1..20: mol_type = other RNA
tacctgaacaccaaccctgt

SEQ ID NO: 2689 - RNA, 20 nt, Homo sapiens
  source 1..20: mol_type = other RNA
agggggatgtctatagacaa

SEQ ID NO: 2690 - RNA, 20 nt, Homo sapiens
  source 1..20: mol_type = other RNA
tctgtcaaatgccatatggg

SEQ ID NO: 2691 - RNA, 20 nt, Homo sapiens
  source 1..20: mol_type = other RNA
gtgcatacactcaagcagtg

SEQ ID NO: 2692 - RNA, 20 nt, Homo sapiens
  source 1..20: mol_type = other RNA
tctaccaagatcaggaacaa

SEQ ID NO: 2693 - RNA, 20 nt, Homo sapiens
  source 1..20: mol_type = other RNA
gggccattgtaatgaacagg

SEQ ID NO: 2694 - RNA, 20 nt, Homo sapiens
  source 1..20: mol_type = other RNA
gtctcttaccgaggttcatg

SEQ ID NO: 2695 - RNA, 20 nt, Homo sapiens
  source 1..20: mol_type = other RNA
ttcaacatgatagagcagag

SEQ ID NO: 2696 - RNA, 20 nt, Homo sapiens
  source 1..20: mol_type = other RNA
aaagttagaaaacaggcaag

SEQ ID NO: 2697 - RNA, 20 nt, Homo sapiens
  source 1..20: mol_type = other RNA
cagggggatgtctatagaca

SEQ ID NO: 2698 - RNA, 20 nt, Homo sapiens
  source 1..20: mol_type = other RNA
ttccaatactgtgttgcagt

SEQ ID NO: 2699 - RNA, 20 nt, Homo sapiens
  source 1..20: mol_type = other RNA
actcaagcagtgtggtgacg

SEQ ID NO: 2700 - RNA, 20 nt, Homo sapiens
  source 1..20: mol_type = other RNA
gagtgctcccagcaagaaag

SEQ ID NO: 2701 - RNA, 20 nt, Homo sapiens
  source 1..20: mol_type = other RNA
tgtcaaatgccatatgggag

SEQ ID NO: 2702 - RNA, 20 nt, Homo sapiens
  source 1..20: mol_type = other RNA
agcggagtggtaagaccaga

SEQ ID NO: 2703 - RNA, 20 nt, Homo sapiens
  source 1..20: mol_type = other RNA
tgtcttcaggttccaaacct

SEQ ID NO: 2704 - RNA, 20 nt, Homo sapiens
  source 1..20: mol_type = other RNA
tgaagctggaagcaagaaag

SEQ ID NO: 2705 - RNA, 20 nt, Homo sapiens
  source 1..20: mol_type = other RNA
actcatcaaaatctgacagg

SEQ ID NO: 2706 - RNA, 20 nt, Homo sapiens
  source 1..20: mol_type = other RNA
cacgtcacctatgttctgcg

SEQ ID NO: 2707 - RNA, 20 nt, Homo sapiens
  source 1..20: mol_type = other RNA
acgtcacctatgttctgcgg

SEQ ID NO: 2708 - RNA, 20 nt, Homo sapiens
  source 1..20: mol_type = other RNA
cagtgggaaacgtaccaagg

SEQ ID NO: 2709 - RNA, 20 nt, Homo sapiens
  source 1..20: mol_type = other RNA
agtgggaaacgtaccaaggt

SEQ ID NO: 2710 - RNA, 20 nt, Homo sapiens
  source 1..20: mol_type = other RNA
cagaacataggtgacgtgta

SEQ ID NO: 2711 - RNA, 20 nt, Homo sapiens
  source 1..20: mol_type = other RNA
cctcaaacaagcctggcaag

SEQ ID NO: 2712 - RNA, 20 nt, Homo sapiens
  source 1..20: mol_type = other RNA
ggatgaagtcacaaaggggt

SEQ ID NO: 2713 - RNA, 20 nt, Homo sapiens
  source 1..20: mol_type = other RNA
ccagtcgatgttccccaccc

SEQ ID NO: 2714 - RNA, 20 nt, Homo sapiens
  source 1..20: mol_type = other RNA
tgtctctcatgcaggcaacg

SEQ ID NO: 2715 - RNA, 20 nt, Homo sapiens
  source 1..20: mol_type = other RNA
ttggtgttgatgatgccgct

SEQ ID NO: 2716 - RNA, 20 nt, Homo sapiens
  source 1..20: mol_type = other RNA
aggccaactcaaaaggctca

SEQ ID NO: 2717 - RNA, 20 nt, Homo sapiens
  source 1..20: mol_type = other RNA
gaacatcgactggtgctggt

SEQ ID NO: 2718 - RNA, 20 nt, Homo sapiens
  source 1..20: mol_type = other RNA
cactccccatctttcagtat

SEQ ID NO: 2719 - RNA, 20 nt, Homo sapiens
  source 1..20: mol_type = other RNA
ggcatccccccgcagaacat

SEQ ID NO: 2720 - RNA, 20 nt, Homo sapiens
  source 1..20: mol_type = other RNA
acttcatccaactgcaccgt

SEQ ID NO: 2721 - RNA, 20 nt, Homo sapiens
  source 1..20: mol_type = other RNA
ttccaggggggcaacaacgc

SEQ ID NO: 2722 - RNA, 20 nt, Homo sapiens
  source 1..20: mol_type = other RNA
agttggatgaagtcacaaag

SEQ ID NO: 2723 - RNA, 20 nt, Homo sapiens
  source 1..20: mol_type = other RNA
gctgatgatgtcggcgtccg

SEQ ID NO: 2724 - RNA, 20 nt, Homo sapiens
  source 1..20: mol_type = other RNA
tcatccaactgcaccgtggg

SEQ ID NO: 2725 - RNA, 20 nt, Homo sapiens
  source 1..20: mol_type = other RNA
gcccagcaccaccgtcacgc

SEQ ID NO: 2726 - RNA, 20 nt, Homo sapiens
  source 1..20: mol_type = other RNA
cataggtgacgtgtatggcg

SEQ ID NO: 2727 - RNA, 20 nt, Homo sapiens
  source 1..20: mol_type = other RNA
cgtcacctatgttctgcggg

SEQ ID NO: 2728 - RNA, 20 nt, Homo sapiens
  source 1..20: mol_type = other RNA
aaaactcatcaaaatctgac

SEQ ID NO: 2729 - RNA, 20 nt, Homo sapiens
  source 1..20: mol_type = other RNA
acataccgaagtcaatgtcg

SEQ ID NO: 2730 - RNA, 20 nt, Homo sapiens
  source 1..20: mol_type = other RNA
cagctttggacgaataaact

SEQ ID NO: 2731 - RNA, 20 nt, Homo sapiens
  source 1..20: mol_type = other RNA
tttattcgtccaaagctgct

SEQ ID NO: 2732 - RNA, 20 nt, Homo sapiens
  source 1..20: mol_type = other RNA
ttgatgaaaatcaaatactg

SEQ ID NO: 2733 - RNA, 20 nt, Homo sapiens
  source 1..20: mol_type = other RNA
cagaatccacaacaactgta

SEQ ID NO: 2734 - RNA, 20 nt, Homo sapiens
  source 1..20: mol_type = other RNA
aggtgaattacaaaaactca

SEQ ID NO: 2735 - RNA, 20 nt, Homo sapiens
  source 1..20: mol_type = other RNA
caatgtctatttccaaagtg

SEQ ID NO: 2736 - RNA, 20 nt, Homo sapiens
  source 1..20: mol_type = other RNA
tttggattaattattccact

SEQ ID NO: 2737 - RNA, 20 nt, Homo sapiens
  source 1..20: mol_type = other RNA
ctggcagcggcacacgatgt

SEQ ID NO: 2738 - RNA, 20 nt, Homo sapiens
  source 1..20: mol_type = other RNA
ggtgcgcagtggggcgacga

SEQ ID NO: 2739 - RNA, 20 nt, Homo sapiens
  source 1..20: mol_type = other RNA
cggaggaaaccgggtgacgg

SEQ ID NO: 2740 - RNA, 20 nt, Homo sapiens
  source 1..20: mol_type = other RNA
gtggtgctcggtgcgcagtg

SEQ ID NO: 2741 - RNA, 20 nt, Homo sapiens
  source 1..20: mol_type = other RNA
ggtatgccacctcaaaatgt

SEQ ID NO: 2742 - RNA, 20 nt, Homo sapiens
  source 1..20: mol_type = other RNA
aatttgaagaggttacaaaa

SEQ ID NO: 2743 - RNA, 20 nt, Homo sapiens
  source 1..20: mol_type = other RNA
tatggaaaagattaaaccaa

SEQ ID NO: 2744 - RNA, 20 nt, Homo sapiens
  source 1..20: mol_type = other RNA
caaatctatataccccactt

SEQ ID NO: 2745 - RNA, 20 nt, Homo sapiens
  source 1..20: mol_type = other RNA
agccatcaaagtcagaaaca

SEQ ID NO: 2746 - RNA, 20 nt, Homo sapiens
  source 1..20: mol_type = other RNA
tacagttgttgtggattctg

SEQ ID NO: 2747 - RNA, 20 nt, Homo sapiens
  source 1..20: mol_type = other RNA
tccaacagtacaatttgaag

SEQ ID NO: 2748 - RNA, 20 nt, Homo sapiens
  source 1..20: mol_type = other RNA
gggcgacgaaggcaaaggga

SEQ ID NO: 2749 - RNA, 20 nt, Homo sapiens
  source 1..20: mol_type = other RNA
tttctatatgaggccctaca

SEQ ID NO: 2750 - RNA, 20 nt, Homo sapiens
  source 1..20: mol_type = other RNA
ctttctaggactagaaggct

SEQ ID NO: 2751 - RNA, 20 nt, Homo sapiens
  source 1..20: mol_type = other RNA
cctttctaggactagaaggc

SEQ ID NO: 2752 - RNA, 20 nt, Homo sapiens
  source 1..20: mol_type = other RNA
actttgatggcttctctgag

SEQ ID NO: 2753 - RNA, 20 nt, Homo sapiens
  source 1..20: mol_type = other RNA
tggaccaccaaagaaaatct

SEQ ID NO: 2754 - RNA, 20 nt, Homo sapiens
  source 1..20: mol_type = other RNA
ggtgtggtaattcatctacc

SEQ ID NO: 2755 - RNA, 20 nt, Homo sapiens
  source 1..20: mol_type = other RNA
cctcacaccagacctacgga

SEQ ID NO: 2756 - RNA, 20 nt, Homo sapiens
  source 1..20: mol_type = other RNA
ccctcacaccagacctacgg

SEQ ID NO: 2757 - RNA, 20 nt, Homo sapiens
  source 1..20: mol_type = other RNA
ttccgtgattcagccaccct

SEQ ID NO: 2758 - RNA, 20 nt, Homo sapiens
  source 1..20: mol_type = other RNA
actcacaaccccaacaggaa

SEQ ID NO: 2759 - RNA, 20 nt, Homo sapiens
  source 1..20: mol_type = other RNA
cgatggccttgtagttacac

SEQ ID NO: 2760 - RNA, 20 nt, Homo sapiens
  source 1..20: mol_type = other RNA
acacagctaacatccagtcc

SEQ ID NO: 2761 - RNA, 20 nt, Homo sapiens
  source 1..20: mol_type = other RNA
cctttatattaatcgagatg

SEQ ID NO: 2762 - RNA, 20 nt, Homo sapiens
  source 1..20: mol_type = other RNA
gtcttctgactcgaggaagt

SEQ ID NO: 2763 - RNA, 20 nt, Homo sapiens
  source 1..20: mol_type = other RNA
ttaccagatcaatgaacgtc

SEQ ID NO: 2764 - RNA, 20 nt, Homo sapiens
  source 1..20: mol_type = other RNA
agggtggctgaatcacggaa

SEQ ID NO: 2765 - RNA, 20 nt, Homo sapiens
  source 1..20: mol_type = other RNA
cctccgtaggtctggtgtga

SEQ ID NO: 2766 - RNA, 20 nt, Homo sapiens
  source 1..20: mol_type = other RNA
ggatagagcagtaagacagc

SEQ ID NO: 2767 - RNA, 20 nt, Homo sapiens
  source 1..20: mol_type = other RNA
gaatttccagctccctccgt

SEQ ID NO: 2768 - RNA, 20 nt, Homo sapiens
  source 1..20: mol_type = other RNA
gtatatcatctctctgtcat

SEQ ID NO: 2769 - RNA, 20 nt, Homo sapiens
  source 1..20: mol_type = other RNA
atcccagggtggctgaatca

SEQ ID NO: 2770 - RNA, 20 nt, Homo sapiens
  source 1..20: mol_type = other RNA
ctttccagtcttctgactcg

SEQ ID NO: 2771 - RNA, 20 nt, Homo sapiens
  source 1..20: mol_type = other RNA
cgcaccatcagtatcccagc

SEQ ID NO: 2772 - RNA, 20 nt, Homo sapiens
  source 1..20: mol_type = other RNA
tgacgttcattgatctggta

SEQ ID NO: 2773 - RNA, 20 nt, Homo sapiens
  source 1..20: mol_type = other RNA
ctggtgtgagggcatttcga

SEQ ID NO: 2774 - RNA, 20 nt, Homo sapiens
  source 1..20: mol_type = other RNA
gactcgaggaagtgggaacc

SEQ ID NO: 2775 - RNA, 20 nt, Homo sapiens
  source 1..20: mol_type = other RNA
acttcctcgagtcagaagac

SEQ ID NO: 2776 - RNA, 20 nt, Homo sapiens
  source 1..20: mol_type = other RNA
tccagctccctccgtaggtc

SEQ ID NO: 2777 - RNA, 20 nt, Homo sapiens
  source 1..20: mol_type = other RNA
atgccctcacaccagaccta

SEQ ID NO: 2778 - RNA, 20 nt, Homo sapiens
  source 1..20: mol_type = other RNA
attccgtgattcagccaccc

SEQ ID NO: 2779 - RNA, 20 nt, Homo sapiens
  source 1..20: mol_type = other RNA
ccctccgtaggtctggtgtg

SEQ ID NO: 2780 - RNA, 20 nt, Homo sapiens
  source 1..20: mol_type = other RNA
gcaagatattatcggcacag

SEQ ID NO: 2781 - RNA, 20 nt, Homo sapiens
  source 1..20: mol_type = other RNA
ccttatcctaccttaacatg

SEQ ID NO: 2782 - RNA, 20 nt, Homo sapiens
  source 1..20: mol_type = other RNA
ttcacgtttgagacccaaga

SEQ ID NO: 2783 - RNA, 20 nt, Homo sapiens
  source 1..20: mol_type = other RNA
tcttgggtctcaaacgtgaa

SEQ ID NO: 2784 - RNA, 20 nt, Homo sapiens
  source 1..20: mol_type = other RNA
tttggcaaaacgtcttcagg

SEQ ID NO: 2785 - RNA, 20 nt, Homo sapiens
  source 1..20: mol_type = other RNA
cttgatgattcaaaatgctg

SEQ ID NO: 2786 - RNA, 20 nt, Homo sapiens
  source 1..20: mol_type = other RNA
cagcaggaatctatcagaga

SEQ ID NO: 2787 - RNA, 20 nt, Homo sapiens
  source 1..20: mol_type = other RNA
gatgattcaaaatgctgggg

SEQ ID NO: 2788 - RNA, 20 nt, Homo sapiens
  source 1..20: mol_type = other RNA
ttcttgggtctcaaacgtga

SEQ ID NO: 2789 - RNA, 20 nt, Homo sapiens
  source 1..20: mol_type = other RNA
ttctctgatagattcctgct

SEQ ID NO: 2790 - RNA, 20 nt, Homo sapiens
  source 1..20: mol_type = other RNA
cctggataacatcactgatg

SEQ ID NO: 2791 - RNA, 20 nt, Homo sapiens
  source 1..20: mol_type = other RNA
tcagcctgaacagaaacaga

SEQ ID NO: 2792 - RNA, 20 nt, Homo sapiens
  source 1..20: mol_type = other RNA
agttgataagcaatacaaat

SEQ ID NO: 2793 - RNA, 20 nt, Homo sapiens
  source 1..20: mol_type = other RNA
gtctctcctcatgttaaggt

SEQ ID NO: 2794 - RNA, 20 nt, Homo sapiens
  source 1..20: mol_type = other RNA
cttctctgatagattcctgc

SEQ ID NO: 2795 - RNA, 20 nt, Homo sapiens
  source 1..20: mol_type = other RNA
gcctgaacagaaacagatgg

SEQ ID NO: 2796 - RNA, 20 nt, Homo sapiens
  source 1..20: mol_type = other RNA
caacttctgaaaaatacgaa

SEQ ID NO: 2797 - RNA, 20 nt, Homo sapiens
  source 1..20: mol_type = other RNA
ccttgatgattcaaaatgct

SEQ ID NO: 2798 - RNA, 20 nt, Homo sapiens
  source 1..20: mol_type = other RNA
gaagcgctgtttgccagtta

SEQ ID NO: 2799 - RNA, 20 nt, Homo sapiens
  source 1..20: mol_type = other RNA
ttataatagcaagatattat

SEQ ID NO: 2800 - RNA, 20 nt, Homo sapiens
  source 1..20: mol_type = other RNA
ggagatgtttcatgctacag

SEQ ID NO: 2801 - RNA, 20 nt, Homo sapiens
  source 1..20: mol_type = other RNA
tttgctttcagtaccataac

SEQ ID NO: 2802 - RNA, 20 nt, Homo sapiens
  source 1..20: mol_type = other RNA
tgcagtatgtagtttgcctg

SEQ ID NO: 2803 - RNA, 20 nt, Homo sapiens
  source 1..20: mol_type = other RNA
agcaggaatctatcagagaa

SEQ ID NO: 2804 - RNA, 20 nt, Homo sapiens
  source 1..20: mol_type = other RNA
ctcatttcagcttgacttag

SEQ ID NO: 2805 - RNA, 20 nt, Homo sapiens
  source 1..20: mol_type = other RNA
aagttggaagtgaatatgtg

SEQ ID NO: 2806 - RNA, 20 nt, Homo sapiens
  source 1..20: mol_type = other RNA
gtgctggtccatcttgaccg

SEQ ID NO: 2807 - RNA, 20 nt, Homo sapiens
  source 1..20: mol_type = other RNA
gtcaagatggaccagcacag

SEQ ID NO: 2808 - RNA, 20 nt, Homo sapiens
  source 1..20: mol_type = other RNA
gacctacctgtgctacgaag

SEQ ID NO: 2809 - RNA, 20 nt, Homo sapiens
  source 1..20: mol_type = other RNA
ctccacttcgtagcacaggt

SEQ ID NO: 2810 - RNA, 20 nt, Homo sapiens
  source 1..20: mol_type = other RNA
caatggcacctcggtcaaga

SEQ ID NO: 2811 - RNA, 20 nt, Homo sapiens
  source 1..20: mol_type = other RNA
actttaacaatggcattgga

SEQ ID NO: 2812 - RNA, 20 nt, Homo sapiens
  source 1..20: mol_type = other RNA
caggggctttctacacaacc

SEQ ID NO: 2813 - RNA, 20 nt, Homo sapiens
  source 1..20: mol_type = other RNA
ggtcaagatggaccagcaca

SEQ ID NO: 2814 - RNA, 20 nt, Homo sapiens
  source 1..20: mol_type = other RNA
gcgcctggacaatggcacct

SEQ ID NO: 2815 - RNA, 20 nt, Homo sapiens
  source 1..20: mol_type = other RNA
taggctaagaatcttctctg

SEQ ID NO: 2816 - RNA, 20 nt, Homo sapiens
  source 1..20: mol_type = other RNA
ggacccggcccagatctaca

SEQ ID NO: 2817 - RNA, 20 nt, Homo sapiens
  source 1..20: mol_type = other RNA
ggggtcgtaatcatagatgc

SEQ ID NO: 2818 - RNA, 20 nt, Homo sapiens
  source 1..20: mol_type = other RNA
agaagcgcagctccgcatgg

SEQ ID NO: 2819 - RNA, 20 nt, Homo sapiens
  source 1..20: mol_type = other RNA
tgaccgaggtgccattgtcc

SEQ ID NO: 2820 - RNA, 20 nt, Homo sapiens
  source 1..20: mol_type = other RNA
gggggtcgtaatcatagatg

SEQ ID NO: 2821 - RNA, 20 nt, Homo sapiens
  source 1..20: mol_type = other RNA
tccaactttaacaatggcat

SEQ ID NO: 2822 - RNA, 20 nt, Homo sapiens
  source 1..20: mol_type = other RNA
tgtgtagaaagcccctgtgc

SEQ ID NO: 2823 - RNA, 20 nt, Homo sapiens
  source 1..20: mol_type = other RNA
ttcacttccaactttaacaa

SEQ ID NO: 2824 - RNA, 20 nt, Homo sapiens
  source 1..20: mol_type = other RNA
cggtcaagatggaccagcac

SEQ ID NO: 2825 - RNA, 20 nt, Homo sapiens
  source 1..20: mol_type = other RNA
gcacagccccaggagaagca

SEQ ID NO: 2826 - RNA, 20 nt, Homo sapiens
  source 1..20: mol_type = other RNA
gtgctacgaagtggagcgcc

SEQ ID NO: 2827 - RNA, 20 nt, Homo sapiens
  source 1..20: mol_type = other RNA
tcacgtgtgtgttctcctga

SEQ ID NO: 2828 - RNA, 20 nt, Homo sapiens
  source 1..20: mol_type = other RNA
ggcgctccacttcgtagcac

SEQ ID NO: 2829 - RNA, 20 nt, Homo sapiens
  source 1..20: mol_type = other RNA
ccaactgcaaagaaggaacc

SEQ ID NO: 2830 - RNA, 20 nt, Homo sapiens
  source 1..20: mol_type = other RNA
ctccacctcatagcacaagt

SEQ ID NO: 2831 - RNA, 20 nt, Homo sapiens
  source 1..20: mol_type = other RNA
atagtccatgatcgtcacgc

SEQ ID NO: 2832 - RNA, 20 nt, Homo sapiens
  source 1..20: mol_type = other RNA
catgggctttctatgcaacg

SEQ ID NO: 2833 - RNA, 20 nt, Homo sapiens
  source 1..20: mol_type = other RNA
gtcctgatggaccagcacat

SEQ ID NO: 2834 - RNA, 20 nt, Homo sapiens
  source 1..20: mol_type = other RNA
ggcgccgtcgaaggaccaaa

SEQ ID NO: 2835 - RNA, 20 nt, Homo sapiens
  source 1..20: mol_type = other RNA
atgaccctttggtccttcga

SEQ ID NO: 2836 - RNA, 20 nt, Homo sapiens
  source 1..20: mol_type = other RNA
catagtccatgatcgtcacg

SEQ ID NO: 2837 - RNA, 20 nt, Homo sapiens
  source 1..20: mol_type = other RNA
ctgaggcttgaaatacacct

SEQ ID NO: 2838 - RNA, 20 nt, Homo sapiens
  source 1..20: mol_type = other RNA
ctggatccatcaggtatctg

SEQ ID NO: 2839 - RNA, 20 nt, Homo sapiens
  source 1..20: mol_type = other RNA
ctgggaaagagattaccgaa

SEQ ID NO: 2840 - RNA, 20 nt, Homo sapiens
  source 1..20: mol_type = other RNA
tgaatgtgtctggatccatc

SEQ ID NO: 2841 - RNA, 20 nt, Homo sapiens
  source 1..20: mol_type = other RNA
ccagacctacttgtgctatg

SEQ ID NO: 2842 - RNA, 20 nt, Homo sapiens
  source 1..20: mol_type = other RNA
actgggaaagagattaccga

SEQ ID NO: 2843 - RNA, 20 nt, Homo sapiens
  source 1..20: mol_type = other RNA
agaggaagcacatttctgcg

SEQ ID NO: 2844 - RNA, 20 nt, Homo sapiens
  source 1..20: mol_type = other RNA
gacctacttgtgctatgagg

SEQ ID NO: 2845 - RNA, 20 nt, Homo sapiens
  source 1..20: mol_type = other RNA
taggctaagaatcttctctg

SEQ ID NO: 2846 - RNA, 20 nt, Homo sapiens
  source 1..20: mol_type = other RNA
tgcatagaaagcccatgtgc

SEQ ID NO: 2847 - RNA, 20 nt, Homo sapiens
  source 1..20: mol_type = other RNA
gtgctggtccatcaggaccc

SEQ ID NO: 2848 - RNA, 20 nt, Homo sapiens
  source 1..20: mol_type = other RNA
ctttgtccacagatacctga

SEQ ID NO: 2849 - RNA, 20 nt, Homo sapiens
  source 1..20: mol_type = other RNA
aggagcccgcgtgacgatca

SEQ ID NO: 2850 - RNA, 20 nt, Homo sapiens
  source 1..20: mol_type = other RNA
gcgcctggacaatggcacct

SEQ ID NO: 2851 - RNA, 20 nt, Homo sapiens
  source 1..20: mol_type = other RNA
ggggtgctcagacaggaatt

SEQ ID NO: 2852 - RNA, 20 nt, Homo sapiens
  source 1..20: mol_type = other RNA
aaggtcagcaattcatgcct

SEQ ID NO: 2853 - RNA, 20 nt, Homo sapiens
  source 1..20: mol_type = other RNA
atctggaaacacttgtaagc

SEQ ID NO: 2854 - RNA, 20 nt, Homo sapiens
  source 1..20: mol_type = other RNA
acgaacccatcctctatggt

SEQ ID NO: 2855 - RNA, 20 nt, Homo sapiens
  source 1..20: mol_type = other RNA
gtctcctaacacaaagtacc

SEQ ID NO: 2856 - RNA, 20 nt, Homo sapiens
  source 1..20: mol_type = other RNA
acctatgggaagccaacgat

SEQ ID NO: 2857 - RNA, 20 nt, Homo sapiens
  source 1..20: mol_type = other RNA
aacttggctgtgcttcaccg

SEQ ID NO: 2858 - RNA, 20 nt, Homo sapiens
  source 1..20: mol_type = other RNA
gcggcgctttataccttcca

SEQ ID NO: 2859 - RNA, 20 nt, Homo sapiens
  source 1..20: mol_type = other RNA
tcttccaggagacaactgag

SEQ ID NO: 2860 - RNA, 20 nt, Homo sapiens
  source 1..20: mol_type = other RNA
atggatactggaagtagtag

SEQ ID NO: 2861 - RNA, 20 nt, Homo sapiens
  source 1..20: mol_type = other RNA
gatactggaagtagtagagg

SEQ ID NO: 2862 - RNA, 20 nt, Homo sapiens
  source 1..20: mol_type = other RNA
acacaaagtaccaggtcacc

SEQ ID NO: 2863 - RNA, 20 nt, Homo sapiens
  source 1..20: mol_type = other RNA
tccgatcgttggcttcccat

SEQ ID NO: 2864 - RNA, 20 nt, Homo sapiens
  source 1..20: mol_type = other RNA
aatgggtctcagaatccacc

SEQ ID NO: 2865 - RNA, 20 nt, Homo sapiens
  source 1..20: mol_type = other RNA
tcagttgtctcctggaagac

SEQ ID NO: 2866 - RNA, 20 nt, Homo sapiens
  source 1..20: mol_type = other RNA
ccaagtttcgttccgatcgt

SEQ ID NO: 2867 - RNA, 20 nt, Homo sapiens
  source 1..20: mol_type = other RNA
aagatgtgtaccaggtgacc

SEQ ID NO: 2868 - RNA, 20 nt, Homo sapiens
  source 1..20: mol_type = other RNA
ccaacgatcggaacgaaact

SEQ ID NO: 2869 - RNA, 20 nt, Homo sapiens
  source 1..20: mol_type = other RNA
cccctgcacagtctgggcaa

SEQ ID NO: 2870 - RNA, 20 nt, Homo sapiens
  source 1..20: mol_type = other RNA
ctggaagtagtagaggcggg

SEQ ID NO: 2871 - RNA, 20 nt, Homo sapiens
  source 1..20: mol_type = other RNA
tggctgtgcttcaccgtgga

SEQ ID NO: 2872 - RNA, 20 nt, Homo sapiens
  source 1..20: mol_type = other RNA
aattggaagtagaatgtgcc

SEQ ID NO: 2873 - RNA, 20 nt, Homo sapiens
  source 1..20: mol_type = other RNA
ttgcccagactgtgcagggg

SEQ ID NO: 2874 - RNA, 20 nt, Homo sapiens
  source 1..20: mol_type = other RNA
agcgccgctcagttgtctcc

SEQ ID NO: 2875 - RNA, 20 nt, Homo sapiens
  source 1..20: mol_type = other RNA
agacccattgtcatgcagaa

SEQ ID NO: 2876 - RNA, 20 nt, Homo sapiens
  source 1..20: mol_type = other RNA
cttccaatttaaaaacctat

SEQ ID NO: 2877 - RNA, 20 nt, Homo sapiens
  source 1..20: mol_type = other RNA
acttccaatttaaaaaccta

SEQ ID NO: 2878 - RNA, 20 nt, Homo sapiens
  source 1..20: mol_type = other RNA
ccacctcccctgcacagtct

SEQ ID NO: 2879 - RNA, 20 nt, Homo sapiens
  source 1..20: mol_type = other RNA
gagattcacgttgctgtgcc

SEQ ID NO: 2880 - RNA, 20 nt, Homo sapiens
  source 1..20: mol_type = other RNA
ctcaaaccggaaatacacct

SEQ ID NO: 2881 - RNA, 20 nt, Homo sapiens
  source 1..20: mol_type = other RNA
atagtccatgatcttcacac

SEQ ID NO: 2882 - RNA, 20 nt, Homo sapiens
  source 1..20: mol_type = other RNA
actaccgggatagagattgg

SEQ ID NO: 2883 - RNA, 20 nt, Homo sapiens
  source 1..20: mol_type = other RNA
ccgggatagagattggcggt

SEQ ID NO: 2884 - RNA, 20 nt, Homo sapiens
  source 1..20: mol_type = other RNA
ttggtcaccttcaccacaca

SEQ ID NO: 2885 - RNA, 20 nt, Homo sapiens
  source 1..20: mol_type = other RNA
acgtcagtcgaatcacaggc

SEQ ID NO: 2886 - RNA, 20 nt, Homo sapiens
  source 1..20: mol_type = other RNA
tgccctcagaaacccgatgg

SEQ ID NO: 2887 - RNA, 20 nt, Homo sapiens
  source 1..20: mol_type = other RNA
ataagaagcacatttctgcg

SEQ ID NO: 2888 - RNA, 20 nt, Homo sapiens
  source 1..20: mol_type = other RNA
ggggttccatgatacaaacc

SEQ ID NO: 2889 - RNA, 20 nt, Homo sapiens
  source 1..20: mol_type = other RNA
tccgaccacaggctttcagt

SEQ ID NO: 2890 - RNA, 20 nt, Homo sapiens
  source 1..20: mol_type = other RNA
agtggaagtagaatatgtgt

SEQ ID NO: 2891 - RNA, 20 nt, Homo sapiens
  source 1..20: mol_type = other RNA
aaaaacctactgaaagcctg

SEQ ID NO: 2892 - RNA, 20 nt, Homo sapiens
  source 1..20: mol_type = other RNA
tcttccggaagacagctgag

SEQ ID NO: 2893 - RNA, 20 nt, Homo sapiens
  source 1..20: mol_type = other RNA
actgacgtttgggtagtacc

SEQ ID NO: 2894 - RNA, 20 nt, Homo sapiens
  source 1..20: mol_type = other RNA
ccaaacgtcagtcgaatcac

SEQ ID NO: 2895 - RNA, 20 nt, Homo sapiens
  source 1..20: mol_type = other RNA
ttgtgccctcagaaacccga

SEQ ID NO: 2896 - RNA, 20 nt, Homo sapiens
  source 1..20: mol_type = other RNA
acctactgaaagcctgtggt

SEQ ID NO: 2897 - RNA, 20 nt, Homo sapiens
  source 1..20: mol_type = other RNA
tcagtcgaatcacaggcagg

SEQ ID NO: 2898 - RNA, 20 nt, Homo sapiens
  source 1..20: mol_type = other RNA
agcgcctgttagcaggcagt

SEQ ID NO: 2899 - RNA, 20 nt, Homo sapiens
  source 1..20: mol_type = other RNA
gtggtgctttgtaacttcca

SEQ ID NO: 2900 - RNA, 20 nt, Homo sapiens
  source 1..20: mol_type = other RNA
catagtccatgatcttcaca

SEQ ID NO: 2901 - RNA, 20 nt, Homo sapiens
  source 1..20: mol_type = other RNA
cccaccgccaatctctatcc

SEQ ID NO: 2902 - RNA, 20 nt, Homo sapiens
  source 1..20: mol_type = other RNA
tatgaagtgaaaataaagag

SEQ ID NO: 2903 - RNA, 20 nt, Homo sapiens
  source 1..20: mol_type = other RNA
ctctatcccggtagtagtag

SEQ ID NO: 2904 - RNA, 20 nt, Homo sapiens
  source 1..20: mol_type = other RNA
aatttgtaccaaggcatgaa

SEQ ID NO: 2905 - RNA, 20 nt, Homo sapiens
  source 1..20: mol_type = other RNA
atcgtccataatcttcacgc

SEQ ID NO: 2906 - RNA, 20 nt, Homo sapiens
  source 1..20: mol_type = other RNA
aagatctttgcgtccaaacg

SEQ ID NO: 2907 - RNA, 20 nt, Homo sapiens
  source 1..20: mol_type = other RNA
acctacgcaaagcctatggt

SEQ ID NO: 2908 - RNA, 20 nt, Homo sapiens
  source 1..20: mol_type = other RNA
gtggtgctttacaacttcca

SEQ ID NO: 2909 - RNA, 20 nt, Homo sapiens
  source 1..20: mol_type = other RNA
gtgaagattatggacgatga

SEQ ID NO: 2910 - RNA, 20 nt, Homo sapiens
  source 1..20: mol_type = other RNA
catcgtccataatcttcacg

SEQ ID NO: 2911 - RNA, 20 nt, Homo sapiens
  source 1..20: mol_type = other RNA
aaaaacctacgcaaagccta

SEQ ID NO: 2912 - RNA, 20 nt, Homo sapiens
  source 1..20: mol_type = other RNA
ctgggaaagagattaccgaa

SEQ ID NO: 2913 - RNA, 20 nt, Homo sapiens
  source 1..20: mol_type = other RNA
ctcaggctgggaatacacct

SEQ ID NO: 2914 - RNA, 20 nt, Homo sapiens
  source 1..20: mol_type = other RNA
tgcgtccaaacggggccttg

SEQ ID NO: 2915 - RNA, 20 nt, Homo sapiens
  source 1..20: mol_type = other RNA
tcttccaggagacaggtgag

SEQ ID NO: 2916 - RNA, 20 nt, Homo sapiens
  source 1..20: mol_type = other RNA
ccagctttcgttccgaccat

SEQ ID NO: 2917 - RNA, 20 nt, Homo sapiens
  source 1..20: mol_type = other RNA
aagtggaagtagaatatgtg

SEQ ID NO: 2918 - RNA, 20 nt, Homo sapiens
  source 1..20: mol_type = other RNA
gaaaactttgtgtacagtga

SEQ ID NO: 2919 - RNA, 20 nt, Homo sapiens
  source 1..20: mol_type = other RNA
actgggaaagagattaccga

SEQ ID NO: 2920 - RNA, 20 nt, Homo sapiens
  source 1..20: mol_type = other RNA
atgggtctcaggatccacct

SEQ ID NO: 2921 - RNA, 20 nt, Homo sapiens
  source 1..20: mol_type = other RNA
tccgaccataggctttgcgt

SEQ ID NO: 2922 - RNA, 20 nt, Homo sapiens
  source 1..20: mol_type = other RNA
tgccttcagaaacccgatgg

SEQ ID NO: 2923 - RNA, 20 nt, Homo sapiens
  source 1..20: mol_type = other RNA
gcgggcggcggagatggtca

SEQ ID NO: 2924 - RNA, 20 nt, Homo sapiens
  source 1..20: mol_type = other RNA
gtattccgacgagaaaggat

SEQ ID NO: 2925 - RNA, 20 nt, Homo sapiens
  source 1..20: mol_type = other RNA
atagacccatcctttctcgt

SEQ ID NO: 2926 - RNA, 20 nt, Homo sapiens
  source 1..20: mol_type = other RNA
tcacctgtctcctggaagag

SEQ ID NO: 2927 - RNA, 20 nt, Homo sapiens
  source 1..20: mol_type = other RNA
agaggaagcacatttctgcg

SEQ ID NO: 2928 - RNA, 20 nt, Homo sapiens
  source 1..20: mol_type = other RNA
gggggtccaggatacaaacc

SEQ ID NO: 2929 - RNA, 20 nt, Homo sapiens
  source 1..20: mol_type = other RNA
aatttgtaccaaggcatgaa

SEQ ID NO: 2930 - RNA, 20 nt, Homo sapiens
  source 1..20: mol_type = other RNA
cttaagttcggaatacacct

SEQ ID NO: 2931 - RNA, 20 nt, Homo sapiens
  source 1..20: mol_type = other RNA
tgcgctccacctcataacac

SEQ ID NO: 2932 - RNA, 20 nt, Homo sapiens
  source 1..20: mol_type = other RNA
cccctgcacaaagtgtacaa

SEQ ID NO: 2933 - RNA, 20 nt, Homo sapiens
  source 1..20: mol_type = other RNA
gcgcatgcacaatgacacct

SEQ ID NO: 2934 - RNA, 20 nt, Homo sapiens
  source 1..20: mol_type = other RNA
tatttaggcagattattcca

SEQ ID NO: 2935 - RNA, 20 nt, Homo sapiens
  source 1..20: mol_type = other RNA
ttctaggctccacataaaca

SEQ ID NO: 2936 - RNA, 20 nt, Homo sapiens
  source 1..20: mol_type = other RNA
atgatcttcatggtggcacg

SEQ ID NO: 2937 - RNA, 20 nt, Homo sapiens
  source 1..20: mol_type = other RNA
aagatctttgcgtccaaagg

SEQ ID NO: 2938 - RNA, 20 nt, Homo sapiens
  source 1..20: mol_type = other RNA
tcctccacttgctgaaccag

SEQ ID NO: 2939 - RNA, 20 nt, Homo sapiens
  source 1..20: mol_type = other RNA
tgagacttacctgtgttatg

SEQ ID NO: 2940 - RNA, 20 nt, Homo sapiens
  source 1..20: mol_type = other RNA
cgaaagatctttgcgtccaa

SEQ ID NO: 2941 - RNA, 20 nt, Homo sapiens
  source 1..20: mol_type = other RNA
tattactgcacatcatgctg

SEQ ID NO: 2942 - RNA, 20 nt, Homo sapiens
  source 1..20: mol_type = other RNA
gcccctgcacaaagtgtaca

SEQ ID NO: 2943 - RNA, 20 nt, Homo sapiens
  source 1..20: mol_type = other RNA
agcgcatgcacaatgacacc

SEQ ID NO: 2944 - RNA, 20 nt, Homo sapiens
  source 1..20: mol_type = other RNA
aacaatgaaccttgggtcag

SEQ ID NO: 2945 - RNA, 20 nt, Homo sapiens
  source 1..20: mol_type = other RNA
gacttacctgtgttatgagg

SEQ ID NO: 2946 - RNA, 20 nt, Homo sapiens
  source 1..20: mol_type = other RNA
ggaagaatctcatctctggg

SEQ ID NO: 2947 - RNA, 20 nt, Homo sapiens
  source 1..20: mol_type = other RNA
atgaagatcatgaattatga

SEQ ID NO: 2948 - RNA, 20 nt, Homo sapiens
  source 1..20: mol_type = other RNA
tgcatagaaagcccctgcgc

SEQ ID NO: 2949 - RNA, 20 nt, Homo sapiens
  source 1..20: mol_type = other RNA
tcatgccgtcctctgaccca

SEQ ID NO: 2950 - RNA, 20 nt, Homo sapiens
  source 1..20: mol_type = other RNA
tccactggttcagcaagtgg

SEQ ID NO: 2951 - RNA, 20 nt, Homo sapiens
  source 1..20: mol_type = other RNA
attactgcacatcatgctgg

SEQ ID NO: 2952 - RNA, 20 nt, Homo sapiens
  source 1..20: mol_type = other RNA
ctgggtcccagaagtagtag

SEQ ID NO: 2953 - RNA, 20 nt, Homo sapiens
  source 1..20: mol_type = other RNA
aagttgaaagtgaatgtggg

SEQ ID NO: 2954 - RNA, 20 nt, Homo sapiens
  source 1..20: mol_type = other RNA
atagacccatcctttctcgt

SEQ ID NO: 2955 - RNA, 20 nt, Homo sapiens
  source 1..20: mol_type = other RNA
aaggccttactacccgagga

SEQ ID NO: 2956 - RNA, 20 nt, Homo sapiens
  source 1..20: mol_type = other RNA
gctcacgaccatctgaacct

SEQ ID NO: 2957 - RNA, 20 nt, Homo sapiens
  source 1..20: mol_type = other RNA
tcagaaggccttactacccg

SEQ ID NO: 2958 - RNA, 20 nt, Homo sapiens
  source 1..20: mol_type = other RNA
aatggctccacgcccacgag

SEQ ID NO: 2959 - RNA, 20 nt, Homo sapiens
  source 1..20: mol_type = other RNA
aagtcacctgttacctcacg

SEQ ID NO: 2960 - RNA, 20 nt, Homo sapiens
  source 1..20: mol_type = other RNA
acgtgaggtaacaggtgact

SEQ ID NO: 2961 - RNA, 20 nt, Homo sapiens
  source 1..20: mol_type = other RNA
gcgtcagctggtaacacaag

SEQ ID NO: 2962 - RNA, 20 nt, Homo sapiens
  source 1..20: mol_type = other RNA
tcgggtagtaaggccttctg

SEQ ID NO: 2963 - RNA, 20 nt, Homo sapiens
  source 1..20: mol_type = other RNA
taccagctgacgccgcagaa

SEQ ID NO: 2964 - RNA, 20 nt, Homo sapiens
  source 1..20: mol_type = other RNA
tgcaccagtggtagtacagg

SEQ ID NO: 2965 - RNA, 20 nt, Homo sapiens
  source 1..20: mol_type = other RNA
ggtagtaaggccttctgagg

SEQ ID NO: 2966 - RNA, 20 nt, Homo sapiens
  source 1..20: mol_type = other RNA
taataaagcaaatttctgca

SEQ ID NO: 2967 - RNA, 20 nt, Homo sapiens
  source 1..20: mol_type = other RNA
gtgggcgtggagccattctg

SEQ ID NO: 2968 - RNA, 20 nt, Homo sapiens
  source 1..20: mol_type = other RNA
attaacgagatcaagtccat

SEQ ID NO: 2969 - RNA, 20 nt, Homo sapiens
  source 1..20: mol_type = other RNA
gagaggctactttgaaaaca

SEQ ID NO: 2970 - RNA, 20 nt, Homo sapiens
  source 1..20: mol_type = other RNA
cgtcagctggtaacacaaga

SEQ ID NO: 2971 - RNA, 20 nt, Homo sapiens
  source 1..20: mol_type = other RNA
ccagtggtagtacaggcggg

SEQ ID NO: 2972 - RNA, 20 nt, Homo sapiens
  source 1..20: mol_type = other RNA
gcaccagtggtagtacaggc

SEQ ID NO: 2973 - RNA, 20 nt, Homo sapiens
  source 1..20: mol_type = other RNA
gatgaagtcaaccagctccc

SEQ ID NO: 2974 - RNA, 20 nt, Homo sapiens
  source 1..20: mol_type = other RNA
acaacaagcgccgcctcaga

SEQ ID NO: 2975 - RNA, 20 nt, Homo sapiens
  source 1..20: mol_type = other RNA
ggagctggttgacttcatca

SEQ ID NO: 2976 - RNA, 20 nt, Homo sapiens
  source 1..20: mol_type = other RNA
taacacaagagggccttcct

SEQ ID NO: 2977 - RNA, 20 nt, Homo sapiens
  source 1..20: mol_type = other RNA
ctgcgtttcgtccagtccca

SEQ ID NO: 2978 - RNA, 20 nt, Homo sapiens
  source 1..20: mol_type = other RNA
tctgctggggcttgcaccag

SEQ ID NO: 2979 - RNA, 20 nt, Homo sapiens
  source 1..20: mol_type = other RNA
gcttgttgttaaactgtaag

SEQ ID NO: 2980 - RNA, 20 nt, Homo sapiens
  source 1..20: mol_type = other RNA
cacaggacacttgtactggg

SEQ ID NO: 2981 - RNA, 20 nt, Homo sapiens
  source 1..20: mol_type = other RNA
ccaaaagctgtactaccatg

SEQ ID NO: 2982 - RNA, 20 nt, Homo sapiens
  source 1..20: mol_type = other RNA
tgacgtggacatttacattg

SEQ ID NO: 2983 - RNA, 20 nt, Homo sapiens
  source 1..20: mol_type = other RNA
aatctcaaagtctacgccgc

SEQ ID NO: 2984 - RNA, 20 nt, Homo sapiens
  source 1..20: mol_type = other RNA
ctggacaaagtggaccctgt

SEQ ID NO: 2985 - RNA, 20 nt, Homo sapiens
  source 1..20: mol_type = other RNA
agacatgaggaagtggcgtg

SEQ ID NO: 2986 - RNA, 20 nt, Homo sapiens
  source 1..20: mol_type = other RNA
tgtgcggctggtgatccgaa

SEQ ID NO: 2987 - RNA, 20 nt, Homo sapiens
  source 1..20: mol_type = other RNA
gcagggaccggtcagacatg

SEQ ID NO: 2988 - RNA, 20 nt, Homo sapiens
  source 1..20: mol_type = other RNA
agaagatcaaagtctctggt

SEQ ID NO: 2989 - RNA, 20 nt, Homo sapiens
  source 1..20: mol_type = other RNA
caggtgagggtcacaaacac

SEQ ID NO: 2990 - RNA, 20 nt, Homo sapiens
  source 1..20: mol_type = other RNA
gagccacaggacacttgtac

SEQ ID NO: 2991 - RNA, 20 nt, Homo sapiens
  source 1..20: mol_type = other RNA
acgtggacatttacattgag

SEQ ID NO: 2992 - RNA, 20 nt, Homo sapiens
  source 1..20: mol_type = other RNA
cagggaagcctcgaggtgca

SEQ ID NO: 2993 - RNA, 20 nt, Homo sapiens
  source 1..20: mol_type = other RNA
gactacctgaaggaccgcaa

SEQ ID NO: 2994 - RNA, 20 nt, Homo sapiens
  source 1..20: mol_type = other RNA
aggcccagaggatacaggaa

SEQ ID NO: 2995 - RNA, 20 nt, Homo sapiens
  source 1..20: mol_type = other RNA
cagttcgccccggagaaacc

SEQ ID NO: 2996 - RNA, 20 nt, Homo sapiens
  source 1..20: mol_type = other RNA
cgcccagtacaagtgtcctg

SEQ ID NO: 2997 - RNA, 20 nt, Homo sapiens
  source 1..20: mol_type = other RNA
gcgggacttcgtagatcacc

SEQ ID NO: 2998 - RNA, 20 nt, Homo sapiens
  source 1..20: mol_type = other RNA
accttacagaatgtggagct

SEQ ID NO: 2999 - RNA, 20 nt, Homo sapiens
  source 1..20: mol_type = other RNA
tgggagatacctggtcactg

SEQ ID NO: 3000 - RNA, 20 nt, Homo sapiens
  source 1..20: mol_type = other RNA
tcaccgtgtacttgggcaag

SEQ ID NO: 3001 - RNA, 20 nt, Homo sapiens
  source 1..20: mol_type = other RNA
ctgatcccaggaactctgtg

SEQ ID NO: 3002 - RNA, 20 nt, Homo sapiens
  source 1..20: mol_type = other RNA
ggaagattctggggtatctg

SEQ ID NO: 3003 - RNA, 20 nt, Homo sapiens
  source 1..20: mol_type = other RNA
gatgaacaggtctttgcgga

SEQ ID NO: 3004 - RNA, 20 nt, Homo sapiens
  source 1..20: mol_type = other RNA
ccggtcctgcaggcgggtgg

SEQ ID NO: 3005 - RNA, 20 nt, Homo sapiens
  source 1..20: mol_type = other RNA
aagtcaacttcaatgtcgga

SEQ ID NO: 3006 - RNA, 20 nt, Homo sapiens
  source 1..20: mol_type = other RNA
cagcccaagatagttaagtg

SEQ ID NO: 3007 - RNA, 20 nt, Homo sapiens
  source 1..20: mol_type = other RNA
cagtaagtcaacttcaatgt

SEQ ID NO: 3008 - RNA, 20 nt, Homo sapiens
  source 1..20: mol_type = other RNA
ctgaatctttggagtacctg

SEQ ID NO: 3009 - RNA, 20 nt, Homo sapiens
  source 1..20: mol_type = other RNA
acaaagtcacatggttcaca

SEQ ID NO: 3010 - RNA, 20 nt, Homo sapiens
  source 1..20: mol_type = other RNA
acagcccaagatagttaagt

SEQ ID NO: 3011 - RNA, 20 nt, Homo sapiens
  source 1..20: mol_type = other RNA
ggccgagatgtctcgctccg

SEQ ID NO: 3012 - RNA, 20 nt, Homo sapiens
  source 1..20: mol_type = other RNA
gagtagcgcgagcacagcta

SEQ ID NO: 3013 - RNA, 20 nt, Homo sapiens
  source 1..20: mol_type = other RNA
tcctgaattgctatgtgtct

SEQ ID NO: 3014 - RNA, 20 nt, Homo sapiens
  source 1..20: mol_type = other RNA
acccagacacatagcaattc

SEQ ID NO: 3015 - RNA, 20 nt, Homo sapiens
  source 1..20: mol_type = other RNA
ctcaggtactccaaagattc

SEQ ID NO: 3016 - RNA, 20 nt, Homo sapiens
  source 1..20: mol_type = other RNA
gaagttgacttactgaagaa

SEQ ID NO: 3017 - RNA, 20 nt, Homo sapiens
  source 1..20: mol_type = other RNA
actctctctttctggcctgg

SEQ ID NO: 3018 - RNA, 20 nt, Homo sapiens
  source 1..20: mol_type = other RNA
ttcagacttgtctttcagca

SEQ ID NO: 3019 - RNA, 20 nt, Homo sapiens
  source 1..20: mol_type = other RNA
actcacgctggatagcctcc

SEQ ID NO: 3020 - RNA, 20 nt, Homo sapiens
  source 1..20: mol_type = other RNA
acttgtctttcagcaaggac

SEQ ID NO: 3021 - RNA, 20 nt, Homo sapiens
  source 1..20: mol_type = other RNA
cgcgagcacagctaaggcca

SEQ ID NO: 3022 - RNA, 20 nt, Homo sapiens
  source 1..20: mol_type = other RNA
tcacgtcatccagcagagaa

SEQ ID NO: 3023 - RNA, 20 nt, Homo sapiens
  source 1..20: mol_type = other RNA
cgtgagtaaacctgaatctt

SEQ ID NO: 3024 - RNA, 20 nt, Homo sapiens
  source 1..20: mol_type = other RNA
tggagagagaattgaaaaag

SEQ ID NO: 3025 - RNA, 20 nt, Homo sapiens
  source 1..20: mol_type = other RNA
ggccacggagcgagacatct

SEQ ID NO: 3026 - RNA, 20 nt, Homo sapiens
  source 1..20: mol_type = other RNA
ctcgcgctactctctctttc

SEQ ID NO: 3027 - RNA, 20 nt, Homo sapiens
  source 1..20: mol_type = other RNA
gctactctctctttctggcc

SEQ ID NO: 3028 - RNA, 20 nt, Homo sapiens
  source 1..20: mol_type = other RNA
ttcctgaattgctatgtgtc

SEQ ID NO: 3029 - RNA, 20 nt, Homo sapiens
  source 1..20: mol_type = other RNA
tttgactttccattctctgc

SEQ ID NO: 3030 - RNA, 20 nt, Homo sapiens
  source 1..20: mol_type = other RNA
gaactgacgtctaagcaagg

SEQ ID NO: 3031 - RNA, 20 nt, Homo sapiens
  source 1..20: mol_type = other RNA
gatccacacaacagtacggt

SEQ ID NO: 3032 - RNA, 20 nt, Homo sapiens
  source 1..20: mol_type = other RNA
tcgacatggcccaattcgag

SEQ ID NO: 3033 - RNA, 20 nt, Homo sapiens
  source 1..20: mol_type = other RNA
ggaccatcaccaaacgaacc

SEQ ID NO: 3034 - RNA, 20 nt, Homo sapiens
  source 1..20: mol_type = other RNA
caagaactgacgtctaagca

SEQ ID NO: 3035 - RNA, 20 nt, Homo sapiens
  source 1..20: mol_type = other RNA
tttagcagcactaatgactg

SEQ ID NO: 3036 - RNA, 20 nt, Homo sapiens
  source 1..20: mol_type = other RNA
ccacaacccagcgacagtca

SEQ ID NO: 3037 - RNA, 20 nt, Homo sapiens
  source 1..20: mol_type = other RNA
agatccacacaacagtacgg

SEQ ID NO: 3038 - RNA, 20 nt, Homo sapiens
  source 1..20: mol_type = other RNA
tcacccagcaaatcgatggg

SEQ ID NO: 3039 - RNA, 20 nt, Homo sapiens
  source 1..20: mol_type = other RNA
gacaccgaaaccgttggaga

SEQ ID NO: 3040 - RNA, 20 nt, Homo sapiens
  source 1..20: mol_type = other RNA
ggactacactcaccaaactg

SEQ ID NO: 3041 - RNA, 20 nt, Homo sapiens
  source 1..20: mol_type = other RNA
ctcatgcgattcactactcg

SEQ ID NO: 3042 - RNA, 20 nt, Homo sapiens
  source 1..20: mol_type = other RNA
ggaaaacgtgggaagtaccc

SEQ ID NO: 3043 - RNA, 20 nt, Homo sapiens
  source 1..20: mol_type = other RNA
ccatccacagtaattcacgg

SEQ ID NO: 3044 - RNA, 20 nt, Homo sapiens
  source 1..20: mol_type = other RNA
ttgctgggtgaaatttgtgg

SEQ ID NO: 3045 - RNA, 20 nt, Homo sapiens
  source 1..20: mol_type = other RNA
tgctcttacaaacaccaagg

SEQ ID NO: 3046 - RNA, 20 nt, Homo sapiens
  source 1..20: mol_type = other RNA
gacatatgtgtacgaacaca

SEQ ID NO: 3047 - RNA, 20 nt, Homo sapiens
  source 1..20: mol_type = other RNA
tgacaccgaaaccgttggag

SEQ ID NO: 3048 - RNA, 20 nt, Homo sapiens
  source 1..20: mol_type = other RNA
acaacaaccctggcaaccct

SEQ ID NO: 3049 - RNA, 20 nt, Homo sapiens
  source 1..20: mol_type = other RNA
agggttgatggggaaaacgt

SEQ ID NO: 3050 - RNA, 20 nt, Homo sapiens
  source 1..20: mol_type = other RNA
gttattgacaccgaaaccgt

SEQ ID NO: 3051 - RNA, 20 nt, Homo sapiens
  source 1..20: mol_type = other RNA
ggcatcactaccatcaagct

SEQ ID NO: 3052 - RNA, 20 nt, Homo sapiens
  source 1..20: mol_type = other RNA
cacatatagacacttacctg

SEQ ID NO: 3053 - RNA, 20 nt, Homo sapiens
  source 1..20: mol_type = other RNA
tggctacagtgatggaatgc

SEQ ID NO: 3054 - RNA, 20 nt, Homo sapiens
  source 1..20: mol_type = other RNA
ggactcaactacaacttgtt

SEQ ID NO: 3055 - RNA, 20 nt, Homo sapiens
  source 1..20: mol_type = other RNA
ccaccacaatgtgacacggt

SEQ ID NO: 3056 - RNA, 20 nt, Homo sapiens
  source 1..20: mol_type = other RNA
tccaccacaatgtgacacgg

SEQ ID NO: 3057 - RNA, 20 nt, Homo sapiens
  source 1..20: mol_type = other RNA
cctcataaatgtttatacgg

SEQ ID NO: 3058 - RNA, 20 nt, Homo sapiens
  source 1..20: mol_type = other RNA
atggaggtgagtcacctcaa

SEQ ID NO: 3059 - RNA, 20 nt, Homo sapiens
  source 1..20: mol_type = other RNA
cccaccgtgtcacattgtgg

SEQ ID NO: 3060 - RNA, 20 nt, Homo sapiens
  source 1..20: mol_type = other RNA
tggtccaccacaatgtgaca

SEQ ID NO: 3061 - RNA, 20 nt, Homo sapiens
  source 1..20: mol_type = other RNA
gggtccagcgaaggaccgca

SEQ ID NO: 3062 - RNA, 20 nt, Homo sapiens
  source 1..20: mol_type = other RNA
gatcgttacctcaagggagt

SEQ ID NO: 3063 - RNA, 20 nt, Homo sapiens
  source 1..20: mol_type = other RNA
ccagccgggccaacaccgtg

SEQ ID NO: 3064 - RNA, 20 nt, Homo sapiens
  source 1..20: mol_type = other RNA
tgtccagtagtcgtgtgatg

SEQ ID NO: 3065 - RNA, 20 nt, Homo sapiens
  source 1..20: mol_type = other RNA
tgactcacctccatcagact

SEQ ID NO: 3066 - RNA, 20 nt, Homo sapiens
  source 1..20: mol_type = other RNA
attagccgatcgttacctca

SEQ ID NO: 3067 - RNA, 20 nt, Homo sapiens
  source 1..20: mol_type = other RNA
acgcgggaggacgccgctca

SEQ ID NO: 3068 - RNA, 20 nt, Homo sapiens
  source 1..20: mol_type = other RNA
cgtcattccggactacatgc

SEQ ID NO: 3069 - RNA, 20 nt, Homo sapiens
  source 1..20: mol_type = other RNA
ccgtcattccggactacatg

SEQ ID NO: 3070 - RNA, 20 nt, Homo sapiens
  source 1..20: mol_type = other RNA
ccatcagactcggacccacc

SEQ ID NO: 3071 - RNA, 20 nt, Homo sapiens
  source 1..20: mol_type = other RNA
tttcccaccgtgtcacattg

SEQ ID NO: 3072 - RNA, 20 nt, Homo sapiens
  source 1..20: mol_type = other RNA
gatactcaagaccagtgctg

SEQ ID NO: 3073 - RNA, 20 nt, Homo sapiens
  source 1..20: mol_type = other RNA
ggtgggtccgagtctgatgg

SEQ ID NO: 3074 - RNA, 20 nt, Homo sapiens
  source 1..20: mol_type = other RNA
ttagccgatcgttacctcaa

SEQ ID NO: 3075 - RNA, 20 nt, Homo sapiens
  source 1..20: mol_type = other RNA
aaactatgggctagccattg

SEQ ID NO: 3076 - RNA, 20 nt, Homo sapiens
  source 1..20: mol_type = other RNA
gaagagactgaccttcgtgg

SEQ ID NO: 3077 - RNA, 20 nt, Homo sapiens
  source 1..20: mol_type = other RNA
ttcgtggtggaagctcctca

SEQ ID NO: 3078 - RNA, 20 nt, Homo sapiens
  source 1..20: mol_type = other RNA
cactcccttgaggtaacgat

SEQ ID NO: 3079 - RNA, 20 nt, Homo sapiens
  source 1..20: mol_type = other RNA
gaagagccgaagctctgcag

SEQ ID NO: 3080 - RNA, 20 nt, Homo sapiens
  source 1..20: mol_type = other RNA
ggttcggtcagtccgtgaag

SEQ ID NO: 3081 - RNA, 20 nt, Homo sapiens
  source 1..20: mol_type = other RNA
gaacgccagagtctcaagcg

SEQ ID NO: 3082 - RNA, 20 nt, Homo sapiens
  source 1..20: mol_type = other RNA
cgtaatcgcgctcaccaagc

SEQ ID NO: 3083 - RNA, 20 nt, Homo sapiens
  source 1..20: mol_type = other RNA
gcggttcggtcagtccgtga

SEQ ID NO: 3084 - RNA, 20 nt, Homo sapiens
  source 1..20: mol_type = other RNA
gattacgtcagtaccacagg

SEQ ID NO: 3085 - RNA, 20 nt, Homo sapiens
  source 1..20: mol_type = other RNA
ccagagtctcaagcgcggtt

SEQ ID NO: 3086 - RNA, 20 nt, Homo sapiens
  source 1..20: mol_type = other RNA
aggtcaggcagctcgaaaca

SEQ ID NO: 3087 - RNA, 20 nt, Homo sapiens
  source 1..20: mol_type = other RNA
acggagaaggtgaccacctg

SEQ ID NO: 3088 - RNA, 20 nt, Homo sapiens
  source 1..20: mol_type = other RNA
cgcgattacgtcagtaccac

SEQ ID NO: 3089 - RNA, 20 nt, Homo sapiens
  source 1..20: mol_type = other RNA
agctcgaaacatggtactcc

SEQ ID NO: 3090 - RNA, 20 nt, Homo sapiens
  source 1..20: mol_type = other RNA
gagctgcctgacctagcagc

SEQ ID NO: 3091 - RNA, 20 nt, Homo sapiens
  source 1..20: mol_type = other RNA
cggttcggtcagtccgtgaa

SEQ ID NO: 3092 - RNA, 20 nt, Homo sapiens
  source 1..20: mol_type = other RNA
gtccgtgaaggggcttctca

SEQ ID NO: 3093 - RNA, 20 nt, Homo sapiens
  source 1..20: mol_type = other RNA
ctcaccaagcaggtgctgaa

SEQ ID NO: 3094 - RNA, 20 nt, Homo sapiens
  source 1..20: mol_type = other RNA
ccgaaccgcgcttgagactc

SEQ ID NO: 3095 - RNA, 20 nt, Homo sapiens
  source 1..20: mol_type = other RNA
gaaggggcttctcacggaga

SEQ ID NO: 3096 - RNA, 20 nt, Homo sapiens
  source 1..20: mol_type = other RNA
gaaaggctcccggagctccg

SEQ ID NO: 3097 - RNA, 20 nt, Homo sapiens
  source 1..20: mol_type = other RNA
tacatcttctgagtgcaaga

SEQ ID NO: 3098 - RNA, 20 nt, Homo sapiens
  source 1..20: mol_type = other RNA
ctccgtgagaagccccttca

SEQ ID NO: 3099 - RNA, 20 nt, Homo sapiens
  source 1..20: mol_type = other RNA
tgtcttccagctgctaggtc

SEQ ID NO: 3100 - RNA, 20 nt, Homo sapiens
  source 1..20: mol_type = other RNA
agcaggtgctgaaaggctcc

SEQ ID NO: 3101 - RNA, 20 nt, Homo sapiens
  source 1..20: mol_type = other RNA
tccagctcacctcggagctc

SEQ ID NO: 3102 - RNA, 20 nt, Homo sapiens
  source 1..20: mol_type = other RNA
ggagcctttcagcacctgct

SEQ ID NO: 3103 - RNA, 20 nt, Homo sapiens
  source 1..20: mol_type = other RNA
ccagctcacctcggagctcc

SEQ ID NO: 3104 - RNA, 20 nt, Homo sapiens
  source 1..20: mol_type = other RNA
agtgcaagatggcatcttcc

SEQ ID NO: 3105 - RNA, 20 nt, Homo sapiens
  source 1..20: mol_type = other RNA
gagtctgcgaggatcgcccg

SEQ ID NO: 3106 - RNA, 20 nt, Homo sapiens
  source 1..20: mol_type = other RNA
cgatgggaccgagatccacg

SEQ ID NO: 3107 - RNA, 20 nt, Homo sapiens
  source 1..20: mol_type = other RNA
ctggatgcggagtctacgat

SEQ ID NO: 3108 - RNA, 20 nt, Homo sapiens
  source 1..20: mol_type = other RNA
cggtaggagcacgtttgccg

SEQ ID NO: 3109 - RNA, 20 nt, Homo sapiens
  source 1..20: mol_type = other RNA
cacggctgtacacacccgat

SEQ ID NO: 3110 - RNA, 20 nt, Homo sapiens
  source 1..20: mol_type = other RNA
acgtgattgaccacaccaag

SEQ ID NO: 3111 - RNA, 20 nt, Homo sapiens
  source 1..20: mol_type = other RNA
cacctgctctcgccttcgga

SEQ ID NO: 3112 - RNA, 20 nt, Homo sapiens
  source 1..20: mol_type = other RNA
cacgtgattgaccacaccaa

SEQ ID NO: 3113 - RNA, 20 nt, Homo sapiens
  source 1..20: mol_type = other RNA
gggaaggcgtccgaccgccg

SEQ ID NO: 3114 - RNA, 20 nt, Homo sapiens
  source 1..20: mol_type = other RNA
gcacgtgattgaccacacca

SEQ ID NO: 3115 - RNA, 20 nt, Homo sapiens
  source 1..20: mol_type = other RNA
ggaaggcgtccgaccgccgg

SEQ ID NO: 3116 - RNA, 20 nt, Homo sapiens
  source 1..20: mol_type = other RNA
tctggatgcggagtctacga

SEQ ID NO: 3117 - RNA, 20 nt, Homo sapiens
  source 1..20: mol_type = other RNA
cttgcaatctttcccgtcca

SEQ ID NO: 3118 - RNA, 20 nt, Homo sapiens
  source 1..20: mol_type = other RNA
ccgtggcaaaatcacagacc

SEQ ID NO: 3119 - RNA, 20 nt, Homo sapiens
  source 1..20: mol_type = other RNA
ggacttacgccgaggcctcg

SEQ ID NO: 3120 - RNA, 20 nt, Homo sapiens
  source 1..20: mol_type = other RNA
cgtggacgggaaagattgca

SEQ ID NO: 3121 - RNA, 20 nt, Homo sapiens
  source 1..20: mol_type = other RNA
gcccctgaggacttacgccg

SEQ ID NO: 3122 - RNA, 20 nt, Homo sapiens
  source 1..20: mol_type = other RNA
tccactcaccagcgcgaccc

SEQ ID NO: 3123 - RNA, 20 nt, Homo sapiens
  source 1..20: mol_type = other RNA
acgggcgatcctcgcagact

SEQ ID NO: 3124 - RNA, 20 nt, Homo sapiens
  source 1..20: mol_type = other RNA
cgtccgaccgccgggggaca

SEQ ID NO: 3125 - RNA, 20 nt, Homo sapiens
  source 1..20: mol_type = other RNA
ggagcacgtttgccgtggac

SEQ ID NO: 3126 - RNA, 20 nt, Homo sapiens
  source 1..20: mol_type = other RNA
catcatggttggctgcactg

SEQ ID NO: 3127 - RNA, 20 nt, Homo sapiens
  source 1..20: mol_type = other RNA
agccgtccgaaggcgagagc

SEQ ID NO: 3128 - RNA, 20 nt, Homo sapiens
  source 1..20: mol_type = other RNA
aaagatggcagcatcatggt

SEQ ID NO: 3129 - RNA, 20 nt, Homo sapiens
  source 1..20: mol_type = other RNA
ggacgtcaggagcaaagatc

SEQ ID NO: 3130 - RNA, 20 nt, Homo sapiens
  source 1..20: mol_type = other RNA
gagtctgcgaggatcgcccg

SEQ ID NO: 3131 - RNA, 20 nt, Homo sapiens
  source 1..20: mol_type = other RNA
cgatgggaccgagatccacg

SEQ ID NO: 3132 - RNA, 20 nt, Homo sapiens
  source 1..20: mol_type = other RNA
ctggatgcggagtctacgat

SEQ ID NO: 3133 - RNA, 20 nt, Homo sapiens
  source 1..20: mol_type = other RNA
cggtaggagcacgtttgccg

SEQ ID NO: 3134 - RNA, 20 nt, Homo sapiens
  source 1..20: mol_type = other RNA
cacggctgtacacacccgat

SEQ ID NO: 3135 - RNA, 20 nt, Homo sapiens
  source 1..20: mol_type = other RNA
acgtgattgaccacaccaag

SEQ ID NO: 3136 - RNA, 20 nt, Homo sapiens
  source 1..20: mol_type = other RNA
cacctgctctcgccttcgga

SEQ ID NO: 3137 - RNA, 20 nt, Homo sapiens
  source 1..20: mol_type = other RNA
cacgtgattgaccacaccaa

SEQ ID NO: 3138 - RNA, 20 nt, Homo sapiens
  source 1..20: mol_type = other RNA
gggaaggcgtccgaccgccg

SEQ ID NO: 3139 - RNA, 20 nt, Homo sapiens
  source 1..20: mol_type = other RNA
gcacgtgattgaccacacca

SEQ ID NO: 3140 - RNA, 20 nt, Homo sapiens
  source 1..20: mol_type = other RNA
ggaaggcgtccgaccgccgg

SEQ ID NO: 3141 - RNA, 20 nt, Homo sapiens
  source 1..20: mol_type = other RNA
tctggatgcggagtctacga

SEQ ID NO: 3142 - RNA, 20 nt, Homo sapiens
  source 1..20: mol_type = other RNA
cttgcaatctttcccgtcca

SEQ ID NO: 3143 - RNA, 20 nt, Homo sapiens
  source 1..20: mol_type = other RNA
ccgtggcaaaatcacagacc

SEQ ID NO: 3144 - RNA, 20 nt, Homo sapiens
  source 1..20: mol_type = other RNA
ggacttacgccgaggcctcg

SEQ ID NO: 3145 - RNA, 20 nt, Homo sapiens
  source 1..20: mol_type = other RNA
cgtggacgggaaagattgca

SEQ ID NO: 3146 - RNA, 20 nt, Homo sapiens
  source 1..20: mol_type = other RNA
gcccctgaggacttacgccg

SEQ ID NO: 3147 - RNA, 20 nt, Homo sapiens
  source 1..20: mol_type = other RNA
tccactcaccagcgcgaccc

SEQ ID NO: 3148 - RNA, 20 nt, Homo sapiens
  source 1..20: mol_type = other RNA
acgggcgatcctcgcagact

SEQ ID NO: 3149 - RNA, 20 nt, Homo sapiens
  source 1..20: mol_type = other RNA
cgtccgaccgccgggggaca

SEQ ID NO: 3150 - RNA, 20 nt, Homo sapiens
  source 1..20: mol_type = other RNA
ggagcacgtttgccgtggac

SEQ ID NO: 3151 - RNA, 20 nt, Homo sapiens
  source 1..20: mol_type = other RNA
catcatggttggctgcactg

SEQ ID NO: 3152 - RNA, 20 nt, Homo sapiens
  source 1..20: mol_type = other RNA
agccgtccgaaggcgagagc

SEQ ID NO: 3153 - RNA, 20 nt, Homo sapiens
  source 1..20: mol_type = other RNA
aaagatggcagcatcatggt

SEQ ID NO: 3154 - RNA, 20 nt, Homo sapiens
  source 1..20: mol_type = other RNA
ggacgtcaggagcaaagatc

SEQ ID NO: 3155 - RNA, 20 nt, Homo sapiens
  source 1..20: mol_type = other RNA
taatgagagcaagacgtgtg

SEQ ID NO: 3156 - RNA, 20 nt, Homo sapiens
  source 1..20: mol_type = other RNA
aaggatatggaaacaaaagt

SEQ ID NO: 3157 - RNA, 20 nt, Homo sapiens
  source 1..20: mol_type = other RNA
taccatgagacatgaacacc

SEQ ID NO: 3158 - RNA, 20 nt, Homo sapiens
  source 1..20: mol_type = other RNA
cttaatatgcaagactctca

SEQ ID NO: 3159 - RNA, 20 nt, Homo sapiens
  source 1..20: mol_type = other RNA
atggaaacaaaagtcggcag

SEQ ID NO: 3160 - RNA, 20 nt, Homo sapiens
  source 1..20: mol_type = other RNA
ggacatgactacagagctgg

SEQ ID NO: 3161 - RNA, 20 nt, Homo sapiens
  source 1..20: mol_type = other RNA
ggagctgaggttgacatcac

SEQ ID NO: 3162 - RNA, 20 nt, Homo sapiens
  source 1..20: mol_type = other RNA
acagacaagggtgctgaaca

SEQ ID NO: 3163 - RNA, 20 nt, Homo sapiens
  source 1..20: mol_type = other RNA
ccacatcctcaggctcagaa

SEQ ID NO: 3164 - RNA, 20 nt, Homo sapiens
  source 1..20: mol_type = other RNA
gctccctagaagaagctcaa

SEQ ID NO: 3165 - RNA, 20 nt, Homo sapiens
  source 1..20: mol_type = other RNA
aagaagacagttacctggca

SEQ ID NO: 3166 - RNA, 20 nt, Homo sapiens
  source 1..20: mol_type = other RNA
tcaggacatgactacagagc

SEQ ID NO: 3167 - RNA, 20 nt, Homo sapiens
  source 1..20: mol_type = other RNA
cagaggtcttgtgctctggg

SEQ ID NO: 3168 - RNA, 20 nt, Homo sapiens
  source 1..20: mol_type = other RNA
tcctagaagaactggagctg

SEQ ID NO: 3169 - RNA, 20 nt, Homo sapiens
  source 1..20: mol_type = other RNA
ccagctatgcccacatcctc

SEQ ID NO: 3170 - RNA, 20 nt, Homo sapiens
  source 1..20: mol_type = other RNA
caatgctgctacaaaatctg

SEQ ID NO: 3171 - RNA, 20 nt, Homo sapiens
  source 1..20: mol_type = other RNA
gacattcccttctgagcctg

SEQ ID NO: 3172 - RNA, 20 nt, Homo sapiens
  source 1..20: mol_type = other RNA
tatcctttgagcttcttcta

SEQ ID NO: 3173 - RNA, 20 nt, Homo sapiens
  source 1..20: mol_type = other RNA
ttcctggtgttcatgtctca

SEQ ID NO: 3174 - RNA, 20 nt, Homo sapiens
  source 1..20: mol_type = other RNA
gaaaaaaaatctcactgctt

SEQ ID NO: 3175 - RNA, 20 nt, Homo sapiens
  source 1..20: mol_type = other RNA
gggttgtcctgcactgcctg

SEQ ID NO: 3176 - RNA, 20 nt, Homo sapiens
  source 1..20: mol_type = other RNA
ccttctgagcctgaggatgt

SEQ ID NO: 3177 - RNA, 20 nt, Homo sapiens
  source 1..20: mol_type = other RNA
gttcatgtctcatggtattc

SEQ ID NO: 3178 - RNA, 20 nt, Homo sapiens
  source 1..20: mol_type = other RNA
taacggagtcaatcaaagct

SEQ ID NO: 3179 - RNA, 20 nt, Homo sapiens
  source 1..20: mol_type = other RNA
gcattgagttgtagtatatc

SEQ ID NO: 3180 - RNA, 20 nt, Homo sapiens
  source 1..20: mol_type = other RNA
aaggagtatttctacaccag

SEQ ID NO: 3181 - RNA, 20 nt, Homo sapiens
  source 1..20: mol_type = other RNA
gcaatgtaggcaaagcagca

SEQ ID NO: 3182 - RNA, 20 nt, Homo sapiens
  source 1..20: mol_type = other RNA
gtagaaatactccttgatgt

SEQ ID NO: 3183 - RNA, 20 nt, Homo sapiens
  source 1..20: mol_type = other RNA
tactccttgatgtgggcacg

SEQ ID NO: 3184 - RNA, 20 nt, Homo sapiens
  source 1..20: mol_type = other RNA
tcaagaccaggacttacatg

SEQ ID NO: 3185 - RNA, 20 nt, Homo sapiens
  source 1..20: mol_type = other RNA
tgtagaaatactccttgatg

SEQ ID NO: 3186 - RNA, 20 nt, Homo sapiens
  source 1..20: mol_type = other RNA
aatactccttgatgtgggca

SEQ ID NO: 3187 - RNA, 20 nt, Homo sapiens
  source 1..20: mol_type = other RNA
gactcacacgactgctgggt

SEQ ID NO: 3188 - RNA, 20 nt, Homo sapiens
  source 1..20: mol_type = other RNA
cgcagagggcagtagcaatg

SEQ ID NO: 3189 - RNA, 20 nt, Homo sapiens
  source 1..20: mol_type = other RNA
agcaatgaggatgacagcga

SEQ ID NO: 3190 - RNA, 20 nt, Homo sapiens
  source 1..20: mol_type = other RNA
ggtgtggtgtccgaggaatc

SEQ ID NO: 3191 - RNA, 20 nt, Homo sapiens
  source 1..20: mol_type = other RNA
agaccaggacttacatgggg

SEQ ID NO: 3192 - RNA, 20 nt, Homo sapiens
  source 1..20: mol_type = other RNA
actgccccgtgcccacatca

SEQ ID NO: 3193 - RNA, 20 nt, Homo sapiens
  source 1..20: mol_type = other RNA
tgatgtgggcacggggcagt

SEQ ID NO: 3194 - RNA, 20 nt, Homo sapiens
  source 1..20: mol_type = other RNA
tagcaatgaggatgacagcg

SEQ ID NO: 3195 - RNA, 20 nt, Homo sapiens
  source 1..20: mol_type = other RNA
gggcagtgggcgggcaatgt

SEQ ID NO: 3196 - RNA, 20 nt, Homo sapiens
  source 1..20: mol_type = other RNA
aggcagatgcaggagcgcag

SEQ ID NO: 3197 - RNA, 20 nt, Homo sapiens
  source 1..20: mol_type = other RNA
gatgacagcgagggctgccg

SEQ ID NO: 3198 - RNA, 20 nt, Homo sapiens
  source 1..20: mol_type = other RNA
gcagcagggtgtggtgtccg

SEQ ID NO: 3199 - RNA, 20 nt, Homo sapiens
  source 1..20: mol_type = other RNA
gtaggcaaagcagcagggtg

SEQ ID NO: 3200 - RNA, 20 nt, Homo sapiens
  source 1..20: mol_type = other RNA
ctttcctcttccagattcct

SEQ ID NO: 3201 - RNA, 20 nt, Homo sapiens
  source 1..20: mol_type = other RNA
ggcaatgtaggcaaagcagc

SEQ ID NO: 3202 - RNA, 20 nt, Homo sapiens
  source 1..20: mol_type = other RNA
ttgatgtgggcacggggcag

SEQ ID NO: 3203 - RNA, 20 nt, Homo sapiens
  source 1..20: mol_type = other RNA
atactccttgatgtgggcac

SEQ ID NO: 3204 - RNA, 20 nt, Homo sapiens
  source 1..20: mol_type = other RNA
tgggttggagcacttgccac

SEQ ID NO: 3205 - RNA, 20 nt, Homo sapiens
  source 1..20: mol_type = other RNA
tggtaggtcccactgtgcaa

SEQ ID NO: 3206 - RNA, 20 nt, Homo sapiens
  source 1..20: mol_type = other RNA
caagtcacaccgttgcacag

SEQ ID NO: 3207 - RNA, 20 nt, Homo sapiens
  source 1..20: mol_type = other RNA
tctggcttctggcacaacac

SEQ ID NO: 3208 - RNA, 20 nt, Homo sapiens
  source 1..20: mol_type = other RNA
aagtcacaccgttgcacagt

SEQ ID NO: 3209 - RNA, 20 nt, Homo sapiens
  source 1..20: mol_type = other RNA
ctggtgatgttaatgcatcc

SEQ ID NO: 3210 - RNA, 20 nt, Homo sapiens
  source 1..20: mol_type = other RNA
ggacatccagtctggtggtg

SEQ ID NO: 3211 - RNA, 20 nt, Homo sapiens
  source 1..20: mol_type = other RNA
tcaccaacaccatctatccc

SEQ ID NO: 3212 - RNA, 20 nt, Homo sapiens
  source 1..20: mol_type = other RNA
attgtggacatccagtctgg

SEQ ID NO: 3213 - RNA, 20 nt, Homo sapiens
  source 1..20: mol_type = other RNA
gcttctggcacaacactggt

SEQ ID NO: 3214 - RNA, 20 nt, Homo sapiens
  source 1..20: mol_type = other RNA
taaacttaatctgtactgta

SEQ ID NO: 3215 - RNA, 20 nt, Homo sapiens
  source 1..20: mol_type = other RNA
gcaattgtggacatccagtc

SEQ ID NO: 3216 - RNA, 20 nt, Homo sapiens
  source 1..20: mol_type = other RNA
gatcctgggatagatggtgt

SEQ ID NO: 3217 - RNA, 20 nt, Homo sapiens
  source 1..20: mol_type = other RNA
cactgtgcaacggtgtgact

SEQ ID NO: 3218 - RNA, 20 nt, Homo sapiens
  source 1..20: mol_type = other RNA
caacggtgtgacttggctta

SEQ ID NO: 3219 - RNA, 20 nt, Homo sapiens
  source 1..20: mol_type = other RNA
tgagacttaaaagggatcct

SEQ ID NO: 3220 - RNA, 20 nt, Homo sapiens
  source 1..20: mol_type = other RNA
gtttagtcgcgttccttcct

SEQ ID NO: 3221 - RNA, 20 nt, Homo sapiens
  source 1..20: mol_type = other RNA
tgtgccagaagccagaagtc

SEQ ID NO: 3222 - RNA, 20 nt, Homo sapiens
  source 1..20: mol_type = other RNA
gaaggcggatacctgacttc

SEQ ID NO: 3223 - RNA, 20 nt, Homo sapiens
  source 1..20: mol_type = other RNA
gtccacaattgccagcagga

SEQ ID NO: 3224 - RNA, 20 nt, Homo sapiens
  source 1..20: mol_type = other RNA
ctgagacttaaaagggatcc

SEQ ID NO: 3225 - RNA, 20 nt, Homo sapiens
  source 1..20: mol_type = other RNA
ataagaaagaagaggctgag

SEQ ID NO: 3226 - RNA, 20 nt, Homo sapiens
  source 1..20: mol_type = other RNA
aattgccagcaggatggcca

SEQ ID NO: 3227 - RNA, 20 nt, Homo sapiens
  source 1..20: mol_type = other RNA
tgtatggcataagaaagaag

SEQ ID NO: 3228 - RNA, 20 nt, Homo sapiens
  source 1..20: mol_type = other RNA
cataagaaagaagaggctga

SEQ ID NO: 3229 - RNA, 20 nt, Homo sapiens
  source 1..20: mol_type = other RNA
gtctatcctcaccaccagac

SEQ ID NO: 3230 - RNA, 20 nt, Homo sapiens
  source 1..20: mol_type = other RNA
acgcaccgaatagttacggt

SEQ ID NO: 3231 - RNA, 20 nt, Homo sapiens
  source 1..20: mol_type = other RNA
caccgaatagttacggtcgg

SEQ ID NO: 3232 - RNA, 20 nt, Homo sapiens
  source 1..20: mol_type = other RNA
cgggtcgggtgagagtggcg

SEQ ID NO: 3233 - RNA, 20 nt, Homo sapiens
  source 1..20: mol_type = other RNA
gtgcacgggtcgggtgagag

SEQ ID NO: 3234 - RNA, 20 nt, Homo sapiens
  source 1..20: mol_type = other RNA
gtggccagccagtcagccga

SEQ ID NO: 3235 - RNA, 20 nt, Homo sapiens
  source 1..20: mol_type = other RNA
ggtcggaggccgatccaggt

SEQ ID NO: 3236 - RNA, 20 nt, Homo sapiens
  source 1..20: mol_type = other RNA
gatgatgggcagcgcccgag

SEQ ID NO: 3237 - RNA, 20 nt, Homo sapiens
  source 1..20: mol_type = other RNA
gcacctcctctacccgaccc

SEQ ID NO: 3238 - RNA, 20 nt, Homo sapiens
  source 1..20: mol_type = other RNA
cgtgcacgacgctgcccggg

SEQ ID NO: 3239 - RNA, 20 nt, Homo sapiens
  source 1..20: mol_type = other RNA
ctctacccgaccccgggccg

SEQ ID NO: 3240 - RNA, 20 nt, Homo sapiens
  source 1..20: mol_type = other RNA
gggcagcgtcgtgcacgggt

SEQ ID NO: 3241 - RNA, 20 nt, Homo sapiens
  source 1..20: mol_type = other RNA
cccaacgcaccgaatagtta

SEQ ID NO: 3242 - RNA, 20 nt, Homo sapiens
  source 1..20: mol_type = other RNA
gatgggcagcgcccgagtgg

SEQ ID NO: 3243 - RNA, 20 nt, Homo sapiens
  source 1..20: mol_type = other RNA
gtgcacgacgctgcccggga

SEQ ID NO: 3244 - RNA, 20 nt, Homo sapiens
  source 1..20: mol_type = other RNA
gaccctctacccacctggat

SEQ ID NO: 3245 - RNA, 20 nt, Homo sapiens
  source 1..20: mol_type = other RNA
ggcccggggtcgggtagagg

SEQ ID NO: 3246 - RNA, 20 nt, Homo sapiens
  source 1..20: mol_type = other RNA
ggcagcgtcgtgcacgggtc

SEQ ID NO: 3247 - RNA, 20 nt, Homo sapiens
  source 1..20: mol_type = other RNA
gtggcggggtcggcgcagtt

SEQ ID NO: 3248 - RNA, 20 nt, Homo sapiens
  source 1..20: mol_type = other RNA
tcccgggcagcgtcgtgcac

SEQ ID NO: 3249 - RNA, 20 nt, Homo sapiens
  source 1..20: mol_type = other RNA
cacgggtcgggtgagagtgg

SEQ ID NO: 3250 - RNA, 20 nt, Homo sapiens
  source 1..20: mol_type = other RNA
ggcctccgaccgtaactatt

SEQ ID NO: 3251 - RNA, 20 nt, Homo sapiens
  source 1..20: mol_type = other RNA
cacctcctctacccgacccc

SEQ ID NO: 3252 - RNA, 20 nt, Homo sapiens
  source 1..20: mol_type = other RNA
gctgctgctgctccacggcg

SEQ ID NO: 3253 - RNA, 20 nt, Homo sapiens
  source 1..20: mol_type = other RNA
ggaggtgcgggcgctgctgg

SEQ ID NO: 3254 - RNA, 20 nt, Homo sapiens
  source 1..20: mol_type = other RNA
cacgctggtggtgctgcacc

SEQ ID NO: 3255 - RNA, 20 nt, Homo sapiens
  source 1..20: mol_type = other RNA
tattgtctgagtggtaacgg

SEQ ID NO: 3256 - RNA, 20 nt, Homo sapiens
  source 1..20: mol_type = other RNA
acaatagcaccaaggcagcg

SEQ ID NO: 3257 - RNA, 20 nt, Homo sapiens
  source 1..20: mol_type = other RNA
gtggtaacggtggatgctgt

SEQ ID NO: 3258 - RNA, 20 nt, Homo sapiens
  source 1..20: mol_type = other RNA
caatagcaccaaggcagcgt

SEQ ID NO: 3259 - RNA, 20 nt, Homo sapiens
  source 1..20: mol_type = other RNA
ccactcagacaatagcacca

SEQ ID NO: 3260 - RNA, 20 nt, Homo sapiens
  source 1..20: mol_type = other RNA
tgtactcacaaatgactgga

SEQ ID NO: 3261 - RNA, 20 nt, Homo sapiens
  source 1..20: mol_type = other RNA
agccacatactcattcagct

SEQ ID NO: 3262 - RNA, 20 nt, Homo sapiens
  source 1..20: mol_type = other RNA
ctgctgatccacaacaactt

SEQ ID NO: 3263 - RNA, 20 nt, Homo sapiens
  source 1..20: mol_type = other RNA
ctgaatgagtatgtggctaa

SEQ ID NO: 3264 - RNA, 20 nt, Homo sapiens
  source 1..20: mol_type = other RNA
ttcatatacaaagagcagga

SEQ ID NO: 3265 - RNA, 20 nt, Homo sapiens
  source 1..20: mol_type = other RNA
gctctttgtatatgaacaga

SEQ ID NO: 3266 - RNA, 20 nt, Homo sapiens
  source 1..20: mol_type = other RNA
cacctgtactcacaaatgac

SEQ ID NO: 3267 - RNA, 20 nt, Homo sapiens
  source 1..20: mol_type = other RNA
ccttggtgctattgtctgag

SEQ ID NO: 3268 - RNA, 20 nt, Homo sapiens
  source 1..20: mol_type = other RNA
aaacacattgcccagcgtga

SEQ ID NO: 3269 - RNA, 20 nt, Homo sapiens
  source 1..20: mol_type = other RNA
acattgcccagcgtgaggga

SEQ ID NO: 3270 - RNA, 20 nt, Homo sapiens
  source 1..20: mol_type = other RNA
agagcactccgaagttgttg

SEQ ID NO: 3271 - RNA, 20 nt, Homo sapiens
  source 1..20: mol_type = other RNA
cacattgcccagcgtgaggg

SEQ ID NO: 3272 - RNA, 20 nt, Homo sapiens
  source 1..20: mol_type = other RNA
tctgttcatatacaaagagc

SEQ ID NO: 3273 - RNA, 20 nt, Homo sapiens
  source 1..20: mol_type = other RNA
cagcagcaggatgaagaact

SEQ ID NO: 3274 - RNA, 20 nt, Homo sapiens
  source 1..20: mol_type = other RNA
gctgattatcctccttgctg

SEQ ID NO: 3275 - RNA, 20 nt, Homo sapiens
  source 1..20: mol_type = other RNA
caaacacattgcccagcgtg

SEQ ID NO: 3276 - RNA, 20 nt, Homo sapiens
  source 1..20: mol_type = other RNA
gggcaatgtgtttgtcatcg

SEQ ID NO: 3277 - RNA, 20 nt, Homo sapiens
  source 1..20: mol_type = other RNA
catcgtgggctctattatca

SEQ ID NO: 3278 - RNA, 20 nt, Homo sapiens
  source 1..20: mol_type = other RNA
gattcttcctttcagatctg

SEQ ID NO: 3279 - RNA, 20 nt, Homo sapiens
  source 1..20: mol_type = other RNA
cctccttgctgaggtgacct

SEQ ID NO: 3280 - RNA, 20 nt, Homo sapiens
  source 1..20: mol_type = other RNA
acaccacctgaagtgactcg

SEQ ID NO: 3281 - RNA, 20 nt, Homo sapiens
  source 1..20: mol_type = other RNA
tggtattggaataactcaca

SEQ ID NO: 3282 - RNA, 20 nt, Homo sapiens
  source 1..20: mol_type = other RNA
tcttccatcaactcatggca

SEQ ID NO: 3283 - RNA, 20 nt, Homo sapiens
  source 1..20: mol_type = other RNA
atggtattggaataactcac

SEQ ID NO: 3284 - RNA, 20 nt, Homo sapiens
  source 1..20: mol_type = other RNA
tgcagtaagtactattccac

SEQ ID NO: 3285 - RNA, 20 nt, Homo sapiens
  source 1..20: mol_type = other RNA
cttactgcaatgctcgctgg

SEQ ID NO: 3286 - RNA, 20 nt, Homo sapiens
  source 1..20: mol_type = other RNA
gctgtcaggagtattctgac

SEQ ID NO: 3287 - RNA, 20 nt, Homo sapiens
  source 1..20: mol_type = other RNA
ccaacccagtgacagctgtc

SEQ ID NO: 3288 - RNA, 20 nt, Homo sapiens
  source 1..20: mol_type = other RNA
aaaatcgattctgctcctct

SEQ ID NO: 3289 - RNA, 20 nt, Homo sapiens
  source 1..20: mol_type = other RNA
aggccccgagtcacttcagg

SEQ ID NO: 3290 - RNA, 20 nt, Homo sapiens
  source 1..20: mol_type = other RNA
aagataattcagttacctag

SEQ ID NO: 3291 - RNA, 20 nt, Homo sapiens
  source 1..20: mol_type = other RNA
tacaacaaacccctcaagaa

SEQ ID NO: 3292 - RNA, 20 nt, Homo sapiens
  source 1..20: mol_type = other RNA
aaaaaacatacctcaaccct

SEQ ID NO: 3293 - RNA, 20 nt, Homo sapiens
  source 1..20: mol_type = other RNA
ggtgtgtcagagtctcccag

SEQ ID NO: 3294 - RNA, 20 nt, Homo sapiens
  source 1..20: mol_type = other RNA
tttctggagtactgtagtgg

SEQ ID NO: 3295 - RNA, 20 nt, Homo sapiens
  source 1..20: mol_type = other RNA
cttccatcaactcatggcag

SEQ ID NO: 3296 - RNA, 20 nt, Homo sapiens
  source 1..20: mol_type = other RNA
ttcttccatcaactcatggc

SEQ ID NO: 3297 - RNA, 20 nt, Homo sapiens
  source 1..20: mol_type = other RNA
cacaccacctgaagtgactc

SEQ ID NO: 3298 - RNA, 20 nt, Homo sapiens
  source 1..20: mol_type = other RNA
gagattcttccatcaactca

SEQ ID NO: 3299 - RNA, 20 nt, Homo sapiens
  source 1..20: mol_type = other RNA
ttatttctggagtactgtag

SEQ ID NO: 3300 - RNA, 20 nt, Homo sapiens
  source 1..20: mol_type = other RNA
agaagttctggagcaacata

SEQ ID NO: 3301 - RNA, 20 nt, Homo sapiens
  source 1..20: mol_type = other RNA
ttggcttggcaacagtattt

SEQ ID NO: 3302 - RNA, 20 nt, Homo sapiens
  source 1..20: mol_type = other RNA
aatcttctgttggatgaaag

SEQ ID NO: 3303 - RNA, 20 nt, Homo sapiens
  source 1..20: mol_type = other RNA
ggaatggtaattcttgctga

SEQ ID NO: 3304 - RNA, 20 nt, Homo sapiens
  source 1..20: mol_type = other RNA
tacctagaagcactgtttac

SEQ ID NO: 3305 - RNA, 20 nt, Homo sapiens
  source 1..20: mol_type = other RNA
gccgtcgtggtaaatccagg

SEQ ID NO: 3306 - RNA, 20 nt, Homo sapiens
  source 1..20: mol_type = other RNA
ctggatttaccacgacggcg

SEQ ID NO: 3307 - RNA, 20 nt, Homo sapiens
  source 1..20: mol_type = other RNA
cggcggttgagaatgatgtg

SEQ ID NO: 3308 - RNA, 20 nt, Homo sapiens
  source 1..20: mol_type = other RNA
atcctgctcgacgacatcgc

SEQ ID NO: 3309 - RNA, 20 nt, Homo sapiens
  source 1..20: mol_type = other RNA
cgtgcagcgggtaaacaatg

SEQ ID NO: 3310 - RNA, 20 nt, Homo sapiens
  source 1..20: mol_type = other RNA
aggagctgaacatcatccaa

SEQ ID NO: 3311 - RNA, 20 nt, Homo sapiens
  source 1..20: mol_type = other RNA
gaagatgacgataccgatgg

SEQ ID NO: 3312 - RNA, 20 nt, Homo sapiens
  source 1..20: mol_type = other RNA
cgtgtcgttcatggaagggg

SEQ ID NO: 3313 - RNA, 20 nt, Homo sapiens
  source 1..20: mol_type = other RNA
accacctggatttaccacga

SEQ ID NO: 3314 - RNA, 20 nt, Homo sapiens
  source 1..20: mol_type = other RNA
gaggacaccaagatgatcgt

SEQ ID NO: 3315 - RNA, 20 nt, Homo sapiens
  source 1..20: mol_type = other RNA
tgttcagctcctccttaacg

SEQ ID NO: 3316 - RNA, 20 nt, Homo sapiens
  source 1..20: mol_type = other RNA
gccgtggtagtctccaccat

SEQ ID NO: 3317 - RNA, 20 nt, Homo sapiens
  source 1..20: mol_type = other RNA
aggggagcgctccaatatcg

SEQ ID NO: 3318 - RNA, 20 nt, Homo sapiens
  source 1..20: mol_type = other RNA
gcgggtgagcgaacggaccc

SEQ ID NO: 3319 - RNA, 20 nt, Homo sapiens
  source 1..20: mol_type = other RNA
cattctcaaccgccgcacct

SEQ ID NO: 3320 - RNA, 20 nt, Homo sapiens
  source 1..20: mol_type = other RNA
gataggcaccgtctataacc

SEQ ID NO: 3321 - RNA, 20 nt, Homo sapiens
  source 1..20: mol_type = other RNA
gatcatcgggctgcgactgg

SEQ ID NO: 3322 - RNA, 20 nt, Homo sapiens
  source 1..20: mol_type = other RNA
tcattgaaaacaaagtgcaa

SEQ ID NO: 3323 - RNA, 20 nt, Homo sapiens
  source 1..20: mol_type = other RNA
acgtgtcgttcatggaaggg

SEQ ID NO: 3324 - RNA, 20 nt, Homo sapiens
  source 1..20: mol_type = other RNA
aggacgtgatgaccccactc

SEQ ID NO: 3325 - RNA, 20 nt, Homo sapiens
  source 1..20: mol_type = other RNA
atcatgaagcagtcccggag

SEQ ID NO: 3326 - RNA, 20 nt, Homo sapiens
  source 1..20: mol_type = other RNA
ggagctgaacatcatccaag

SEQ ID NO: 3327 - RNA, 20 nt, Homo sapiens
  source 1..20: mol_type = other RNA
tgctgaccgggtaggaagcg

SEQ ID NO: 3328 - RNA, 20 nt, Homo sapiens
  source 1..20: mol_type = other RNA
gcacgatgcgcagctccatc

SEQ ID NO: 3329 - RNA, 20 nt, Homo sapiens
  source 1..20: mol_type = other RNA
ggatcctgcaggcggctgcg

SEQ ID NO: 3330 - RNA, 20 nt, Homo sapiens
  source 1..20: mol_type = other RNA
ggatgctctacagcgacaca

SEQ ID NO: 3331 - RNA, 20 nt, Homo sapiens
  source 1..20: mol_type = other RNA
atctatatggtaatacaaca

SEQ ID NO: 3332 - RNA, 20 nt, Homo sapiens
  source 1..20: mol_type = other RNA
tcagaagccaaattgagcgt

SEQ ID NO: 3333 - RNA, 20 nt, Homo sapiens
  source 1..20: mol_type = other RNA
gtgatgagacaggatacagt

SEQ ID NO: 3334 - RNA, 20 nt, Homo sapiens
  source 1..20: mol_type = other RNA
gtactactgtaactgcgacg

SEQ ID NO: 3335 - RNA, 20 nt, Homo sapiens
  source 1..20: mol_type = other RNA
atttatacgaagtggcacaa

SEQ ID NO: 3336 - RNA, 20 nt, Homo sapiens
  source 1..20: mol_type = other RNA
ggaatccagaaatgtgcctg

SEQ ID NO: 3337 - RNA, 20 nt, Homo sapiens
  source 1..20: mol_type = other RNA
tattactggatagatcctga

SEQ ID NO: 3338 - RNA, 20 nt, Homo sapiens
  source 1..20: mol_type = other RNA
tgaccacagagtgccagtgg

SEQ ID NO: 3339 - RNA, 20 nt, Homo sapiens
  source 1..20: mol_type = other RNA
gagaagcactactactgggg

SEQ ID NO: 3340 - RNA, 20 nt, Homo sapiens
  source 1..20: mol_type = other RNA
acacacctaagtttaaactg

SEQ ID NO: 3341 - RNA, 20 nt, Homo sapiens
  source 1..20: mol_type = other RNA
gttggagatactgaccgtca

SEQ ID NO: 3342 - RNA, 20 nt, Homo sapiens
  source 1..20: mol_type = other RNA
tggaaagtgctcgcaaacat

SEQ ID NO: 3343 - RNA, 20 nt, Homo sapiens
  source 1..20: mol_type = other RNA
gattgttgaacaccccaggt

SEQ ID NO: 3344 - RNA, 20 nt, Homo sapiens
  source 1..20: mol_type = other RNA
cagatgcagacgcctgtggt

SEQ ID NO: 3345 - RNA, 20 nt, Homo sapiens
  source 1..20: mol_type = other RNA
tggaagcccttacacttggt

SEQ ID NO: 3346 - RNA, 20 nt, Homo sapiens
  source 1..20: mol_type = other RNA
gcgacgcggactacaagcaa

SEQ ID NO: 3347 - RNA, 20 nt, Homo sapiens
  source 1..20: mol_type = other RNA
agtgaaggagtaatcctgca

SEQ ID NO: 3348 - RNA, 20 nt, Homo sapiens
  source 1..20: mol_type = other RNA
tatgccaagataaacaagag

SEQ ID NO: 3349 - RNA, 20 nt, Homo sapiens
  source 1..20: mol_type = other RNA
atgttgcagtaaactttcag

SEQ ID NO: 3350 - RNA, 20 nt, Homo sapiens
  source 1..20: mol_type = other RNA
aaacattaactctgacggtg

SEQ ID NO: 3351 - RNA, 20 nt, Homo sapiens
  source 1..20: mol_type = other RNA
tcaagattgttgaacacccc

SEQ ID NO: 3352 - RNA, 20 nt, Homo sapiens
  source 1..20: mol_type = other RNA
caacgctacaagttacctgg

SEQ ID NO: 3353 - RNA, 20 nt, Homo sapiens
  source 1..20: mol_type = other RNA
cgaggttcgcttcctagcca

SEQ ID NO: 3354 - RNA, 20 nt, Homo sapiens
  source 1..20: mol_type = other RNA
atttcccacatcaaatgaaa

SEQ ID NO: 3355 - RNA, 20 nt, Homo sapiens
  source 1..20: mol_type = other RNA
aatggatctgacaccgacca

SEQ ID NO: 3356 - RNA, 20 nt, Homo sapiens
  source 1..20: mol_type = other RNA
gtggtactcgccgatcagtg

SEQ ID NO: 3357 - RNA, 20 nt, Homo sapiens
  source 1..20: mol_type = other RNA
cctgcggaggaaccttacgc

SEQ ID NO: 3358 - RNA, 20 nt, Homo sapiens
  source 1..20: mol_type = other RNA
ggacatctgacagcgtccag

SEQ ID NO: 3359 - RNA, 20 nt, Homo sapiens
  source 1..20: mol_type = other RNA
ttcagagtacgagaacaacg

SEQ ID NO: 3360 - RNA, 20 nt, Homo sapiens
  source 1..20: mol_type = other RNA
gcatccttaccaatgcacag

SEQ ID NO: 3361 - RNA, 20 nt, Homo sapiens
  source 1..20: mol_type = other RNA
ctgaaccggataattagggg

SEQ ID NO: 3362 - RNA, 20 nt, Homo sapiens
  source 1..20: mol_type = other RNA
tggcctattagaatgtaccc

SEQ ID NO: 3363 - RNA, 20 nt, Homo sapiens
  source 1..20: mol_type = other RNA
actgtacagaactacagtgt

SEQ ID NO: 3364 - RNA, 20 nt, Homo sapiens
  source 1..20: mol_type = other RNA
ccggttattcagctgcacac

SEQ ID NO: 3365 - RNA, 20 nt, Homo sapiens
  source 1..20: mol_type = other RNA
tggaggatctcattacccat

SEQ ID NO: 3366 - RNA, 20 nt, Homo sapiens
  source 1..20: mol_type = other RNA
tgatgagtatccgatcctga

SEQ ID NO: 3367 - RNA, 20 nt, Homo sapiens
  source 1..20: mol_type = other RNA
gaagttacgttgtacccaca

SEQ ID NO: 3368 - RNA, 20 nt, Homo sapiens
  source 1..20: mol_type = other RNA
ggttgctcatgctcacaatg

SEQ ID NO: 3369 - RNA, 20 nt, Homo sapiens
  source 1..20: mol_type = other RNA
catactgcaagacgggaacg

SEQ ID NO: 3370 - RNA, 20 nt, Homo sapiens
  source 1..20: mol_type = other RNA
ccacactcacctatgcacga

SEQ ID NO: 3371 - RNA, 20 nt, Homo sapiens
  source 1..20: mol_type = other RNA
agttacgttgtacccacaag

SEQ ID NO: 3372 - RNA, 20 nt, Homo sapiens
  source 1..20: mol_type = other RNA
gaggtgcactccacacacgg

SEQ ID NO: 3373 - RNA, 20 nt, Homo sapiens
  source 1..20: mol_type = other RNA
acatgtggatccaatctgcg

SEQ ID NO: 3374 - RNA, 20 nt, Homo sapiens
  source 1..20: mol_type = other RNA
cggatagttccaacggcgaa

SEQ ID NO: 3375 - RNA, 20 nt, Homo sapiens
  source 1..20: mol_type = other RNA
gtccacttaacagcaacctg

SEQ ID NO: 3376 - RNA, 20 nt, Homo sapiens
  source 1..20: mol_type = other RNA
tacaacgtaacttctcagaa

SEQ ID NO: 3377 - RNA, 20 nt, Homo sapiens
  source 1..20: mol_type = other RNA
accgcgagaaagtcaaactg

SEQ ID NO: 3378 - RNA, 20 nt, Homo sapiens
  source 1..20: mol_type = other RNA
ggtaccaaaggaattcggta

SEQ ID NO: 3379 - RNA, 20 nt, Homo sapiens
  source 1..20: mol_type = other RNA
aggcctgccttgatcgtatg

SEQ ID NO: 3380 - RNA, 20 nt, Homo sapiens
  source 1..20: mol_type = other RNA
cgggcacaacttctacaacg

SEQ ID NO: 3381 - RNA, 20 nt, Homo sapiens
  source 1..20: mol_type = other RNA
tcaacaaacggaataccacg

SEQ ID NO: 3382 - RNA, 20 nt, Homo sapiens
  source 1..20: mol_type = other RNA
caccaatgcgcacgtcagcg

SEQ ID NO: 3383 - RNA, 20 nt, Homo sapiens
  source 1..20: mol_type = other RNA
cccacagcctacctgccacg

SEQ ID NO: 3384 - RNA, 20 nt, Homo sapiens
  source 1..20: mol_type = other RNA
ggcctctatgaatcccatgt

SEQ ID NO: 3385 - RNA, 20 nt, Homo sapiens
  source 1..20: mol_type = other RNA
tacctacatgggattcatag

SEQ ID NO: 3386 - RNA, 20 nt, Homo sapiens
  source 1..20: mol_type = other RNA
gtcctcggtaaacataactc

SEQ ID NO: 3387 - RNA, 20 nt, Homo sapiens
  source 1..20: mol_type = other RNA
atgctgtggcagcatgtgtg

SEQ ID NO: 3388 - RNA, 20 nt, Homo sapiens
  source 1..20: mol_type = other RNA
cggaataccacgtggcaggt

SEQ ID NO: 3389 - RNA, 20 nt, Homo sapiens
  source 1..20: mol_type = other RNA
ggggacacacttacctacat

SEQ ID NO: 3390 - RNA, 20 nt, Homo sapiens
  source 1..20: mol_type = other RNA
caaacggaataccacgtggc

SEQ ID NO: 3391 - RNA, 20 nt, Homo sapiens
  source 1..20: mol_type = other RNA
ccgttgacgtggtgctcaca

SEQ ID NO: 3392 - RNA, 20 nt, Homo sapiens
  source 1..20: mol_type = other RNA
atccagagttatgtttaccg

SEQ ID NO: 3393 - RNA, 20 nt, Homo sapiens
  source 1..20: mol_type = other RNA
caatgcgcacgtcagcgtgg

SEQ ID NO: 3394 - RNA, 20 nt, Homo sapiens
  source 1..20: mol_type = other RNA
gttgaccagctcatccgaca

SEQ ID NO: 3395 - RNA, 20 nt, Homo sapiens
  source 1..20: mol_type = other RNA
ctcccggcccccatgcacgg

SEQ ID NO: 3396 - RNA, 20 nt, Homo sapiens
  source 1..20: mol_type = other RNA
aggggacacacttacctaca

SEQ ID NO: 3397 - RNA, 20 nt, Homo sapiens
  source 1..20: mol_type = other RNA
tgcctgcaagcttcgatgca

SEQ ID NO: 3398 - RNA, 20 nt, Homo sapiens
  source 1..20: mol_type = other RNA
acagatcttgctacacttgg

SEQ ID NO: 3399 - RNA, 20 nt, Homo sapiens
  source 1..20: mol_type = other RNA
cacagatcttgctacacttg

SEQ ID NO: 3400 - RNA, 20 nt, Homo sapiens
  source 1..20: mol_type = other RNA
ccctgtgagcaccacgtcaa

SEQ ID NO: 3401 - RNA, 20 nt, Homo sapiens
  source 1..20: mol_type = other RNA
agcaccacgtcaacggctcc

SEQ ID NO: 3402 - RNA, 20 nt, Homo sapiens
  source 1..20: mol_type = other RNA
ctacagcccgacctacaaac

SEQ ID NO: 3403 - RNA, 20 nt, Homo sapiens
  source 1..20: mol_type = other RNA
atcaaagagatcagagacca

SEQ ID NO: 3404 - RNA, 20 nt, Homo sapiens
  source 1..20: mol_type = other RNA
gtggctatcctgctgaagct

SEQ ID NO: 3405 - RNA, 20 nt, Homo sapiens
  source 1..20: mol_type = other RNA
tgcccaggtagtatggcggt

SEQ ID NO: 3406 - RNA, 20 nt, Homo sapiens
  source 1..20: mol_type = other RNA
tacccaccgccatactacct

SEQ ID NO: 3407 - RNA, 20 nt, Homo sapiens
  source 1..20: mol_type = other RNA
caagtgaacctcactatcca

SEQ ID NO: 3408 - RNA, 20 nt, Homo sapiens
  source 1..20: mol_type = other RNA
ttccatgctagcaatgcacg

SEQ ID NO: 3409 - RNA, 20 nt, Homo sapiens
  source 1..20: mol_type = other RNA
acctcactatccaaggactg

SEQ ID NO: 3410 - RNA, 20 nt, Homo sapiens
  source 1..20: mol_type = other RNA
gtgtgtgagtatgcatctcc

SEQ ID NO: 3411 - RNA, 20 nt, Homo sapiens
  source 1..20: mol_type = other RNA
caactcattccccatcatgt

SEQ ID NO: 3412 - RNA, 20 nt, Homo sapiens
  source 1..20: mol_type = other RNA
cctatgcccaggtagtatgg

SEQ ID NO: 3413 - RNA, 20 nt, Homo sapiens
  source 1..20: mol_type = other RNA
gggactctacatctgcaagg

SEQ ID NO: 3414 - RNA, 20 nt, Homo sapiens
  source 1..20: mol_type = other RNA
cctcactatccaaggactga

SEQ ID NO: 3415 - RNA, 20 nt, Homo sapiens
  source 1..20: mol_type = other RNA
tgcatactcacacacaaagc

SEQ ID NO: 3416 - RNA, 20 nt, Homo sapiens
  source 1..20: mol_type = other RNA
ctagatgattccatctgcac

SEQ ID NO: 3417 - RNA, 20 nt, Homo sapiens
  source 1..20: mol_type = other RNA
gttcacttgatttccactgg

SEQ ID NO: 3418 - RNA, 20 nt, Homo sapiens
  source 1..20: mol_type = other RNA
aggactgagggccatggaca

SEQ ID NO: 3419 - RNA, 20 nt, Homo sapiens
  source 1..20: mol_type = other RNA
gtacccaccgccatactacc

SEQ ID NO: 3420 - RNA, 20 nt, Homo sapiens
  source 1..20: mol_type = other RNA
ccgccatactacctgggcat

SEQ ID NO: 3421 - RNA, 20 nt, Homo sapiens
  source 1..20: mol_type = other RNA
gtgcggcaacctacatgatg

SEQ ID NO: 3422 - RNA, 20 nt, Homo sapiens
  source 1..20: mol_type = other RNA
tactacctgggcataggcaa

SEQ ID NO: 3423 - RNA, 20 nt, Homo sapiens
  source 1..20: mol_type = other RNA
aggtccgggtgacagtgctt

SEQ ID NO: 3424 - RNA, 20 nt, Homo sapiens
  source 1..20: mol_type = other RNA
cctgccgaagcactgtcacc

SEQ ID NO: 3425 - RNA, 20 nt, Homo sapiens
  source 1..20: mol_type = other RNA
gcagatggaatcatctagga

SEQ ID NO: 3426 - RNA, 20 nt, Homo sapiens
  source 1..20: mol_type = other RNA
ccaggtgactgaagtctgtg

SEQ ID NO: 3427 - RNA, 20 nt, Homo sapiens
  source 1..20: mol_type = other RNA
gcacaaggctcagctgaacc

SEQ ID NO: 3428 - RNA, 20 nt, Homo sapiens
  source 1..20: mol_type = other RNA
gtggtactggccagcagccg

SEQ ID NO: 3429 - RNA, 20 nt, Homo sapiens
  source 1..20: mol_type = other RNA
ggatgaagagaagaaaaaac

SEQ ID NO: 3430 - RNA, 20 nt, Homo sapiens
  source 1..20: mol_type = other RNA
gagctgtataacaaagctgg

SEQ ID NO: 3431 - RNA, 20 nt, Homo sapiens
  source 1..20: mol_type = other RNA
ttgagaatgcaggctcatgg

SEQ ID NO: 3432 - RNA, 20 nt, Homo sapiens
  source 1..20: mol_type = other RNA
cagacttacacaaaagcccc

SEQ ID NO: 3433 - RNA, 20 nt, Homo sapiens
  source 1..20: mol_type = other RNA
ctcaaggctctgccacaact

SEQ ID NO: 3434 - RNA, 20 nt, Homo sapiens
  source 1..20: mol_type = other RNA
agacttacacaaaagcccca

SEQ ID NO: 3435 - RNA, 20 nt, Homo sapiens
  source 1..20: mol_type = other RNA
aatggtgtcttgaccagtat

SEQ ID NO: 3436 - RNA, 20 nt, Homo sapiens
  source 1..20: mol_type = other RNA
cgtgagctgtataacaaagc

SEQ ID NO: 3437 - RNA, 20 nt, Homo sapiens
  source 1..20: mol_type = other RNA
actggtcgccacgttgaaga

SEQ ID NO: 3438 - RNA, 20 nt, Homo sapiens
  source 1..20: mol_type = other RNA
atttccattgttctgtacaa

SEQ ID NO: 3439 - RNA, 20 nt, Homo sapiens
  source 1..20: mol_type = other RNA
gataaacaaacaagaagacc

SEQ ID NO: 3440 - RNA, 20 nt, Homo sapiens
  source 1..20: mol_type = other RNA
ctcttcaacgtggcgaccag

SEQ ID NO: 3441 - RNA, 20 nt, Homo sapiens
  source 1..20: mol_type = other RNA
tgcaggaagtctgcagcatg

SEQ ID NO: 3442 - RNA, 20 nt, Homo sapiens
  source 1..20: mol_type = other RNA
gacagggtacctgtgcgccg

SEQ ID NO: 3443 - RNA, 20 nt, Homo sapiens
  source 1..20: mol_type = other RNA
gcagcccttgtacagaacaa

SEQ ID NO: 3444 - RNA, 20 nt, Homo sapiens
  source 1..20: mol_type = other RNA
acagaacaatggaaatggca

SEQ ID NO: 3445 - RNA, 20 nt, Homo sapiens
  source 1..20: mol_type = other RNA
taaagacagcaaaagttggg

SEQ ID NO: 3446 - RNA, 20 nt, Homo sapiens
  source 1..20: mol_type = other RNA
accatgagcctgcattctca

SEQ ID NO: 3447 - RNA, 20 nt, Homo sapiens
  source 1..20: mol_type = other RNA
ctataaagacagcaaaagtt

SEQ ID NO: 3448 - RNA, 20 nt, Homo sapiens
  source 1..20: mol_type = other RNA
caccaagcacaaagtcagca

SEQ ID NO: 3449 - RNA, 20 nt, Homo sapiens
  source 1..20: mol_type = other RNA
acagggctccctcttcaacg

SEQ ID NO: 3450 - RNA, 20 nt, Homo sapiens
  source 1..20: mol_type = other RNA
cttgtacagaacaatggaaa

SEQ ID NO: 3451 - RNA, 20 nt, Homo sapiens
  source 1..20: mol_type = other RNA
gggctctggatgccgagttg

SEQ ID NO: 3452 - RNA, 20 nt, Homo sapiens
  source 1..20: mol_type = other RNA
tactaccagctctccaatac

SEQ ID NO: 3453 - RNA, 20 nt, Homo sapiens
  source 1..20: mol_type = other RNA
tctataaagacagcaaaagt

SEQ ID NO: 3454 - RNA, 20 nt, Homo sapiens
  source 1..20: mol_type = other RNA
cttgaagagattgcaactct

SEQ ID NO: 3455 - RNA, 20 nt, Homo sapiens
  source 1..20: mol_type = other RNA
actcacatgatctcaacacg

SEQ ID NO: 3456 - RNA, 20 nt, Homo sapiens
  source 1..20: mol_type = other RNA
gtaatcaacctgttaatcca

SEQ ID NO: 3457 - RNA, 20 nt, Homo sapiens
  source 1..20: mol_type = other RNA
agcagttagcaaggaaaggt

SEQ ID NO: 3458 - RNA, 20 nt, Homo sapiens
  source 1..20: mol_type = other RNA
cagcgtacagttctagagag

SEQ ID NO: 3459 - RNA, 20 nt, Homo sapiens
  source 1..20: mol_type = other RNA
tttactgaaagcagttagca

SEQ ID NO: 3460 - RNA, 20 nt, Homo sapiens
  source 1..20: mol_type = other RNA
ttgattactaatgctgatgc

SEQ ID NO: 3461 - RNA, 20 nt, Homo sapiens
  source 1..20: mol_type = other RNA
cgtggacaaaattggcttgc

SEQ ID NO: 3462 - RNA, 20 nt, Homo sapiens
  source 1..20: mol_type = other RNA
agtgctacaatgaaaaagaa

SEQ ID NO: 3463 - RNA, 20 nt, Homo sapiens
  source 1..20: mol_type = other RNA
gataaggcagcaaatcagaa

SEQ ID NO: 3464 - RNA, 20 nt, Homo sapiens
  source 1..20: mol_type = other RNA
atgtctgaatccagaatcga

SEQ ID NO: 3465 - RNA, 20 nt, Homo sapiens
  source 1..20: mol_type = other RNA
ttcttgatggccttcgattc

SEQ ID NO: 3466 - RNA, 20 nt, Homo sapiens
  source 1..20: mol_type = other RNA
cagtgctacaatgaaaaaga

SEQ ID NO: 3467 - RNA, 20 nt, Homo sapiens
  source 1..20: mol_type = other RNA
cagaatggcagtttgattca

SEQ ID NO: 3468 - RNA, 20 nt, Homo sapiens
  source 1..20: mol_type = other RNA
ctgactctaagtggcattca

SEQ ID NO: 3469 - RNA, 20 nt, Homo sapiens
  source 1..20: mol_type = other RNA
tgctttcagtaaattcttga

SEQ ID NO: 3470 - RNA, 20 nt, Homo sapiens
  source 1..20: mol_type = other RNA
tctaaagaccttggattaac

SEQ ID NO: 3471 - RNA, 20 nt, Homo sapiens
  source 1..20: mol_type = other RNA
cttatctttctgactctaag

SEQ ID NO: 3472 - RNA, 20 nt, Homo sapiens
  source 1..20: mol_type = other RNA
tctaagtggcattcaaggta

SEQ ID NO: 3473 - RNA, 20 nt, Homo sapiens
  source 1..20: mol_type = other RNA
tgaaagcagttagcaaggaa

SEQ ID NO: 3474 - RNA, 20 nt, Homo sapiens
  source 1..20: mol_type = other RNA
cacttagagtcagaaagata

SEQ ID NO: 3475 - RNA, 20 nt, Homo sapiens
  source 1..20: mol_type = other RNA
atcgcgtccaacaaccgtaa

SEQ ID NO: 3476 - RNA, 20 nt, Homo sapiens
  source 1..20: mol_type = other RNA
ccatacgaaccgaatagatg

SEQ ID NO: 3477 - RNA, 20 nt, Homo sapiens
  source 1..20: mol_type = other RNA
gtgtgcgccagagtcagcga

SEQ ID NO: 3478 - RNA, 20 nt, Homo sapiens
  source 1..20: mol_type = other RNA
ctgatcgccatccttgaaca

SEQ ID NO: 3479 - RNA, 20 nt, Homo sapiens
  source 1..20: mol_type = other RNA
tatggactgtccgttgtggg

SEQ ID NO: 3480 - RNA, 20 nt, Homo sapiens
  source 1..20: mol_type = other RNA
gatatgctggccacccacaa

SEQ ID NO: 3481 - RNA, 20 nt, Homo sapiens
  source 1..20: mol_type = other RNA
catcgcgtccaacaaccgta

SEQ ID NO: 3482 - RNA, 20 nt, Homo sapiens
  source 1..20: mol_type = other RNA
caatacctcctacaagaatg

SEQ ID NO: 3483 - RNA, 20 nt, Homo sapiens
  source 1..20: mol_type = other RNA
tctgtatgacattcaactca

SEQ ID NO: 3484 - RNA, 20 nt, Homo sapiens
  source 1..20: mol_type = other RNA
cccatctattcggttcgtat

SEQ ID NO: 3485 - RNA, 20 nt, Homo sapiens
  source 1..20: mol_type = other RNA
gcagatcaaggagatgacat

SEQ ID NO: 3486 - RNA, 20 nt, Homo sapiens
  source 1..20: mol_type = other RNA
cagcatctcaccttcaacca

SEQ ID NO: 3487 - RNA, 20 nt, Homo sapiens
  source 1..20: mol_type = other RNA
ggaggtattgaagcagatca

SEQ ID NO: 3488 - RNA, 20 nt, Homo sapiens
  source 1..20: mol_type = other RNA
ggtatcgccttcgctgactc

SEQ ID NO: 3489 - RNA, 20 nt, Homo sapiens
  source 1..20: mol_type = other RNA
agcatctcaccttcaaccag

SEQ ID NO: 3490 - RNA, 20 nt, Homo sapiens
  source 1..20: mol_type = other RNA
taccgccacgaagacaggaa

SEQ ID NO: 3491 - RNA, 20 nt, Homo sapiens
  source 1..20: mol_type = other RNA
gccatccttgaacagggcaa

SEQ ID NO: 3492 - RNA, 20 nt, Homo sapiens
  source 1..20: mol_type = other RNA
agggtccccattcttgtagg

SEQ ID NO: 3493 - RNA, 20 nt, Homo sapiens
  source 1..20: mol_type = other RNA
agggcaaggacttctctggg

SEQ ID NO: 3494 - RNA, 20 nt, Homo sapiens
  source 1..20: mol_type = other RNA
gtcatacagaattacaatga

SEQ ID NO: 3495 - RNA, 20 nt, Homo sapiens
  source 1..20: mol_type = other RNA
accaggggactaggtccacc

SEQ ID NO: 3496 - RNA, 20 nt, Homo sapiens
  source 1..20: mol_type = other RNA
tgtctatggactgtccgttg

SEQ ID NO: 3497 - RNA, 20 nt, Homo sapiens
  source 1..20: mol_type = other RNA
cagggtccatttaaccacag

SEQ ID NO: 3498 - RNA, 20 nt, Homo sapiens
  source 1..20: mol_type = other RNA
aatggcaggctgcccaccag

SEQ ID NO: 3499 - RNA, 20 nt, Homo sapiens
  source 1..20: mol_type = other RNA
tgttggtgatagagtcactc

SEQ ID NO: 3500 - RNA, 20 nt, Homo sapiens
  source 1..20: mol_type = other RNA
tgttgttcgaacatcaatgg

SEQ ID NO: 3501 - RNA, 20 nt, Homo sapiens
  source 1..20: mol_type = other RNA
gcactaacaacagatcatgt

SEQ ID NO: 3502 - RNA, 20 nt, Homo sapiens
  source 1..20: mol_type = other RNA
tttacgaaaaatctgccaag

SEQ ID NO: 3503 - RNA, 20 nt, Homo sapiens
  source 1..20: mol_type = other RNA
cattcttatccacaacatca

SEQ ID NO: 3504 - RNA, 20 nt, Homo sapiens
  source 1..20: mol_type = other RNA
gctgaaggagagcgacgacg

SEQ ID NO: 3505 - RNA, 20 nt, Homo sapiens
  source 1..20: mol_type = other RNA
gaagttgaaatacgcatact

SEQ ID NO: 3506 - RNA, 20 nt, Homo sapiens
  source 1..20: mol_type = other RNA
tcaacgttgtactttcctca

SEQ ID NO: 3507 - RNA, 20 nt, Homo sapiens
  source 1..20: mol_type = other RNA
gcacagatctaagaacacga

SEQ ID NO: 3508 - RNA, 20 nt, Homo sapiens
  source 1..20: mol_type = other RNA
tcaaccacaaaagatgacgt

SEQ ID NO: 3509 - RNA, 20 nt, Homo sapiens
  source 1..20: mol_type = other RNA
cgtgtacgttgcacccacaa

SEQ ID NO: 3510 - RNA, 20 nt, Homo sapiens
  source 1..20: mol_type = other RNA
ctgttgttagtgcagcacat

SEQ ID NO: 3511 - RNA, 20 nt, Homo sapiens
  source 1..20: mol_type = other RNA
tcctgaacatctcaccgagt

SEQ ID NO: 3512 - RNA, 20 nt, Homo sapiens
  source 1..20: mol_type = other RNA
tcaggcccttgttaatcaag

SEQ ID NO: 3513 - RNA, 20 nt, Homo sapiens
  source 1..20: mol_type = other RNA
ctgtcataatcatcactcag

SEQ ID NO: 3514 - RNA, 20 nt, Homo sapiens
  source 1..20: mol_type = other RNA
ttcctgatagttgcagacga

SEQ ID NO: 3515 - RNA, 20 nt, Homo sapiens
  source 1..20: mol_type = other RNA
agatgcttatcaaaagagtg

SEQ ID NO: 3516 - RNA, 20 nt, Homo sapiens
  source 1..20: mol_type = other RNA
taaactgcattgtctcactg

SEQ ID NO: 3517 - RNA, 20 nt, Homo sapiens
  source 1..20: mol_type = other RNA
cttacacaagtctggccaga

SEQ ID NO: 3518 - RNA, 20 nt, Homo sapiens
  source 1..20: mol_type = other RNA
cctgtcataatcatcactca

SEQ ID NO: 3519 - RNA, 20 nt, Homo sapiens
  source 1..20: mol_type = other RNA
tctttccaactggttaagca

SEQ ID NO: 3520 - RNA, 20 nt, Homo sapiens
  source 1..20: mol_type = other RNA
gaaacttcaggttgaaatgg

SEQ ID NO: 3521 - RNA, 20 nt, Homo sapiens
  source 1..20: mol_type = other RNA
tattgcagttggaaccgagc

SEQ ID NO: 3522 - RNA, 20 nt, Homo sapiens
  source 1..20: mol_type = other RNA
ctggaataccgtatcaaagt

SEQ ID NO: 3523 - RNA, 20 nt, Homo sapiens
  source 1..20: mol_type = other RNA
ttcaactagaagtggaaaca

SEQ ID NO: 3524 - RNA, 20 nt, Homo sapiens
  source 1..20: mol_type = other RNA
gcctactcggtgagatgttc

SEQ ID NO: 3525 - RNA, 20 nt, Homo sapiens
  source 1..20: mol_type = other RNA
acattggtccaagcatcgag

SEQ ID NO: 3526 - RNA, 20 nt, Homo sapiens
  source 1..20: mol_type = other RNA
gtgctcactgatttcgagga

SEQ ID NO: 3527 - RNA, 20 nt, Homo sapiens
  source 1..20: mol_type = other RNA
tcgcaaacgacgagagacag

SEQ ID NO: 3528 - RNA, 20 nt, Homo sapiens
  source 1..20: mol_type = other RNA
gatgactgcgattgtcccag

SEQ ID NO: 3529 - RNA, 20 nt, Homo sapiens
  source 1..20: mol_type = other RNA
agtgctcactgatttcgagg

SEQ ID NO: 3530 - RNA, 20 nt, Homo sapiens
  source 1..20: mol_type = other RNA
gaagcagaccgacatcacag

SEQ ID NO: 3531 - RNA, 20 nt, Homo sapiens
  source 1..20: mol_type = other RNA
acaacatttacacagtacac

SEQ ID NO: 3532 - RNA, 20 nt, Homo sapiens
  source 1..20: mol_type = other RNA
tttaccttcagactgatgcg

SEQ ID NO: 3533 - RNA, 20 nt, Homo sapiens
  source 1..20: mol_type = other RNA
ccttggcaggaaatccactt

SEQ ID NO: 3534 - RNA, 20 nt, Homo sapiens
  source 1..20: mol_type = other RNA
acaagtgaccactcgatgct

SEQ ID NO: 3535 - RNA, 20 nt, Homo sapiens
  source 1..20: mol_type = other RNA
cacaattaggaccctgcagt

SEQ ID NO: 3536 - RNA, 20 nt, Homo sapiens
  source 1..20: mol_type = other RNA
gcaaagcattggtatctcac

SEQ ID NO: 3537 - RNA, 20 nt, Homo sapiens
  source 1..20: mol_type = other RNA
gagagttagaggaaaaagat

SEQ ID NO: 3538 - RNA, 20 nt, Homo sapiens
  source 1..20: mol_type = other RNA
gagtaggacactacttccct

SEQ ID NO: 3539 - RNA, 20 nt, Homo sapiens
  source 1..20: mol_type = other RNA
gatgtcggaatcttcagcca

SEQ ID NO: 3540 - RNA, 20 nt, Homo sapiens
  source 1..20: mol_type = other RNA
aacaacatttacacagtaca

SEQ ID NO: 3541 - RNA, 20 nt, Homo sapiens
  source 1..20: mol_type = other RNA
gcacaattaggaccctgcag

SEQ ID NO: 3542 - RNA, 20 nt, Homo sapiens
  source 1..20: mol_type = other RNA
cgctgactcctacctgacag

SEQ ID NO: 3543 - RNA, 20 nt, Homo sapiens
  source 1..20: mol_type = other RNA
gagtggtcacttgtatggac

SEQ ID NO: 3544 - RNA, 20 nt, Homo sapiens
  source 1..20: mol_type = other RNA
cttgccacgcatcagtctga

SEQ ID NO: 3545 - RNA, 20 nt, Homo sapiens
  source 1..20: mol_type = other RNA
atctcaccggagccgcctct

SEQ ID NO: 3546 - RNA, 20 nt, Homo sapiens
  source 1..20: mol_type = other RNA
tgcagtcagactcagaactt

SEQ ID NO: 3547 - RNA, 20 nt, Homo sapiens
  source 1..20: mol_type = other RNA
gtggaagacgtattctggtg

SEQ ID NO: 3548 - RNA, 20 nt, Homo sapiens
  source 1..20: mol_type = other RNA
catcagtggagacagtgatg

SEQ ID NO: 3549 - RNA, 20 nt, Homo sapiens
  source 1..20: mol_type = other RNA
aaaaaacaggaagtgaagga

SEQ ID NO: 3550 - RNA, 20 nt, Homo sapiens
  source 1..20: mol_type = other RNA
cgtgcacggtggaactgcca

SEQ ID NO: 3551 - RNA, 20 nt, Homo sapiens
  source 1..20: mol_type = other RNA
cctgccatatcagtcagccg

SEQ ID NO: 3552 - RNA, 20 nt, Homo sapiens
  source 1..20: mol_type = other RNA
cagagtgagccgtttgtccg

SEQ ID NO: 3553 - RNA, 20 nt, Homo sapiens
  source 1..20: mol_type = other RNA
actgtcgtcagctgattcgg

SEQ ID NO: 3554 - RNA, 20 nt, Homo sapiens
  source 1..20: mol_type = other RNA
agagcggaaaagccccccgg

SEQ ID NO: 3555 - RNA, 20 nt, Homo sapiens
  source 1..20: mol_type = other RNA
actgcatagtcgattcatgc

SEQ ID NO: 3556 - RNA, 20 nt, Homo sapiens
  source 1..20: mol_type = other RNA
agtaagcaagccgtgcacgg

SEQ ID NO: 3557 - RNA, 20 nt, Homo sapiens
  source 1..20: mol_type = other RNA
aacaagtataccaagagccg

SEQ ID NO: 3558 - RNA, 20 nt, Homo sapiens
  source 1..20: mol_type = other RNA
ccacggctgactgatatggc

SEQ ID NO: 3559 - RNA, 20 nt, Homo sapiens
  source 1..20: mol_type = other RNA
cgtggcagttccaccgtgca

SEQ ID NO: 3560 - RNA, 20 nt, Homo sapiens
  source 1..20: mol_type = other RNA
ttcagtaagcaagccgtgca

SEQ ID NO: 3561 - RNA, 20 nt, Homo sapiens
  source 1..20: mol_type = other RNA
ctgccttcttcttggctgcg

SEQ ID NO: 3562 - RNA, 20 nt, Homo sapiens
  source 1..20: mol_type = other RNA
agcttcccgtataccaccaa

SEQ ID NO: 3563 - RNA, 20 nt, Homo sapiens
  source 1..20: mol_type = other RNA
ggatcatcaaccctgatggg

SEQ ID NO: 3564 - RNA, 20 nt, Homo sapiens
  source 1..20: mol_type = other RNA
gcagtgatgagctggatgcg

SEQ ID NO: 3565 - RNA, 20 nt, Homo sapiens
  source 1..20: mol_type = other RNA
tgatgagctggatgcgtgga

SEQ ID NO: 3566 - RNA, 20 nt, Homo sapiens
  source 1..20: mol_type = other RNA
gcacccgggccgagtcctca

SEQ ID NO: 3567 - RNA, 20 nt, Homo sapiens
  source 1..20: mol_type = other RNA
gcttactgaaggtgacaggc

SEQ ID NO: 3568 - RNA, 20 nt, Homo sapiens
  source 1..20: mol_type = other RNA
ccctccgggtgccagcaccc

SEQ ID NO: 3569 - RNA, 20 nt, Homo sapiens
  source 1..20: mol_type = other RNA
cgttagaattggtgcgtgaa

SEQ ID NO: 3570 - RNA, 20 nt, Homo sapiens
  source 1..20: mol_type = other RNA
ttgccatgatgggcgacagg

SEQ ID NO: 3571 - RNA, 20 nt, Homo sapiens
  source 1..20: mol_type = other RNA
gtgcacggcttgcttactga

SEQ ID NO: 3572 - RNA, 20 nt, Homo sapiens
  source 1..20: mol_type = other RNA
gtgggtacgcaccttccagc

SEQ ID NO: 3573 - RNA, 20 nt, Homo sapiens
  source 1..20: mol_type = other RNA
cgccgactccatgatccccg

SEQ ID NO: 3574 - RNA, 20 nt, Homo sapiens
  source 1..20: mol_type = other RNA
ggcggtggcagcggttgctg

SEQ ID NO: 3575 - RNA, 20 nt, Homo sapiens
  source 1..20: mol_type = other RNA
ccttggcaccgtacgcctgg

SEQ ID NO: 3576 - RNA, 20 nt, Homo sapiens
  source 1..20: mol_type = other RNA
tgtactgcccatactgtcgg

SEQ ID NO: 3577 - RNA, 20 nt, Homo sapiens
  source 1..20: mol_type = other RNA
ggcataagaaatttgacggt

SEQ ID NO: 3578 - RNA, 20 nt, Homo sapiens
  source 1..20: mol_type = other RNA
gtgcagcatgtatattcctg

SEQ ID NO: 3579 - RNA, 20 nt, Homo sapiens
  source 1..20: mol_type = other RNA
atgagggcacggatacaccc

SEQ ID NO: 3580 - RNA, 20 nt, Homo sapiens
  source 1..20: mol_type = other RNA
catgcaagaaaacagcatgc

SEQ ID NO: 3581 - RNA, 20 nt, Homo sapiens
  source 1..20: mol_type = other RNA
ctactgtctcaacgtcatga

SEQ ID NO: 3582 - RNA, 20 nt, Homo sapiens
  source 1..20: mol_type = other RNA
tgagggcacggatacaccct

SEQ ID NO: 3583 - RNA, 20 nt, Homo sapiens
  source 1..20: mol_type = other RNA
ttgagacagtagttgttgca

SEQ ID NO: 3584 - RNA, 20 nt, Homo sapiens
  source 1..20: mol_type = other RNA
tgggaagcccccgacagtat

SEQ ID NO: 3585 - RNA, 20 nt, Homo sapiens
  source 1..20: mol_type = other RNA
gagggcacggatacaccctg

SEQ ID NO: 3586 - RNA, 20 nt, Homo sapiens
  source 1..20: mol_type = other RNA
aggctgacctcgacacagag

SEQ ID NO: 3587 - RNA, 20 nt, Homo sapiens
  source 1..20: mol_type = other RNA
ctgtactgcccatactgtcg

SEQ ID NO: 3588 - RNA, 20 nt, Homo sapiens
  source 1..20: mol_type = other RNA
atcccctaccaggagatcgc

SEQ ID NO: 3589 - RNA, 20 nt, Homo sapiens
  source 1..20: mol_type = other RNA
ggggccattcaacattgagt

SEQ ID NO: 3590 - RNA, 20 nt, Homo sapiens
  source 1..20: mol_type = other RNA
acagattccactctgtgtcg

SEQ ID NO: 3591 - RNA, 20 nt, Homo sapiens
  source 1..20: mol_type = other RNA
tgctgtactgcccatactgt

SEQ ID NO: 3592 - RNA, 20 nt, Homo sapiens
  source 1..20: mol_type = other RNA
atgaccgactcaatgttgaa

SEQ ID NO: 3593 - RNA, 20 nt, Homo sapiens
  source 1..20: mol_type = other RNA
gcagtacagcatcttcatga

SEQ ID NO: 3594 - RNA, 20 nt, Homo sapiens
  source 1..20: mol_type = other RNA
tactgtctcaacgtcatgaa

SEQ ID NO: 3595 - RNA, 20 nt, Homo sapiens
  source 1..20: mol_type = other RNA
acacttaagaatctgtcctc

SEQ ID NO: 3596 - RNA, 20 nt, Homo sapiens
  source 1..20: mol_type = other RNA
cggtgccaagggattcagcc

SEQ ID NO: 3597 - RNA, 20 nt, Homo sapiens
  source 1..20: mol_type = other RNA
ctgaaaaggtactacactgg

SEQ ID NO: 3598 - RNA, 20 nt, Homo sapiens
  source 1..20: mol_type = other RNA
acctgaatcttcagtttccg

SEQ ID NO: 3599 - RNA, 20 nt, Homo sapiens
  source 1..20: mol_type = other RNA
taacttgtcttccatttctg

SEQ ID NO: 3600 - RNA, 20 nt, Homo sapiens
  source 1..20: mol_type = other RNA
tttacgtgtgacacgcagaa

SEQ ID NO: 3601 - RNA, 20 nt, Homo sapiens
  source 1..20: mol_type = other RNA
cgtgtcacacgtaaaccccg

SEQ ID NO: 3602 - RNA, 20 nt, Homo sapiens
  source 1..20: mol_type = other RNA
cagctgctgacattatcaca

SEQ ID NO: 3603 - RNA, 20 nt, Homo sapiens
  source 1..20: mol_type = other RNA
atcgaccataacacagcacg

SEQ ID NO: 3604 - RNA, 20 nt, Homo sapiens
  source 1..20: mol_type = other RNA
ctgctgccgtctacagtcgg

SEQ ID NO: 3605 - RNA, 20 nt, Homo sapiens
  source 1..20: mol_type = other RNA
gtttacgtgtgacacgcaga

SEQ ID NO: 3606 - RNA, 20 nt, Homo sapiens
  source 1..20: mol_type = other RNA
ccacatacactgctgtcccg

SEQ ID NO: 3607 - RNA, 20 nt, Homo sapiens
  source 1..20: mol_type = other RNA
tccacaggtaacaactccgt

SEQ ID NO: 3608 - RNA, 20 nt, Homo sapiens
  source 1..20: mol_type = other RNA
ggtgtgaaccaggtcgcaga

SEQ ID NO: 3609 - RNA, 20 nt, Homo sapiens
  source 1..20: mol_type = other RNA
ccgcgggacagcagtgtatg

SEQ ID NO: 3610 - RNA, 20 nt, Homo sapiens
  source 1..20: mol_type = other RNA
ggtcacacacagtgtcttgg

SEQ ID NO: 3611 - RNA, 20 nt, Homo sapiens
  source 1..20: mol_type = other RNA
gtccggacacatgaccgagc

SEQ ID NO: 3612 - RNA, 20 nt, Homo sapiens
  source 1..20: mol_type = other RNA
actaagctgcctgcgcacac

SEQ ID NO: 3613 - RNA, 20 nt, Homo sapiens
  source 1..20: mol_type = other RNA
gagttggcagcaggtatcgg

SEQ ID NO: 3614 - RNA, 20 nt, Homo sapiens
  source 1..20: mol_type = other RNA
acatacactgctgtcccgcg

SEQ ID NO: 3615 - RNA, 20 nt, Homo sapiens
  source 1..20: mol_type = other RNA
ggatgtgaaatgtgacatgg

SEQ ID NO: 3616 - RNA, 20 nt, Homo sapiens
  source 1..20: mol_type = other RNA
cggtcatgtgtccggacgca

SEQ ID NO: 3617 - RNA, 20 nt, Homo sapiens
  source 1..20: mol_type = other RNA
tgatagtcagttcgaatgcc

SEQ ID NO: 3618 - RNA, 20 nt, Homo sapiens
  source 1..20: mol_type = other RNA
gtgtcacacgtaaaccccgc

SEQ ID NO: 3619 - RNA, 20 nt, Homo sapiens
  source 1..20: mol_type = other RNA
tggcagcaggtatcggagga

SEQ ID NO: 3620 - RNA, 20 nt, Homo sapiens
  source 1..20: mol_type = other RNA
gtccacaggtaacaactccg

SEQ ID NO: 3621 - RNA, 20 nt, Homo sapiens
  source 1..20: mol_type = other RNA
cctgctgccaactcacgtct

SEQ ID NO: 3622 - RNA, 20 nt, Homo sapiens
  source 1..20: mol_type = other RNA
gggggatgtgaaatgtgaca

SEQ ID NO: 3623 - RNA, 20 nt, Homo sapiens
  source 1..20: mol_type = other RNA
tccacaggccgtggcatgcg

SEQ ID NO: 3624 - RNA, 20 nt, Homo sapiens
  source 1..20: mol_type = other RNA
acaacactgagcaggcatct

SEQ ID NO: 3625 - RNA, 20 nt, Homo sapiens
  source 1..20: mol_type = other RNA
cgagactacgaccctcggca

SEQ ID NO: 3626 - RNA, 20 nt, Homo sapiens
  source 1..20: mol_type = other RNA
atccggaccctggacaacgg

SEQ ID NO: 3627 - RNA, 20 nt, Homo sapiens
  source 1..20: mol_type = other RNA
atgtattgcctccgacctgg

SEQ ID NO: 3628 - RNA, 20 nt, Homo sapiens
  source 1..20: mol_type = other RNA
tggggcttggaagacatgca

SEQ ID NO: 3629 - RNA, 20 nt, Homo sapiens
  source 1..20: mol_type = other RNA
ctacaacaagcacaccaagg

SEQ ID NO: 3630 - RNA, 20 nt, Homo sapiens
  source 1..20: mol_type = other RNA
ctgtctccagagagtcaacg

SEQ ID NO: 3631 - RNA, 20 nt, Homo sapiens
  source 1..20: mol_type = other RNA
ccagcttgagggattcccga

SEQ ID NO: 3632 - RNA, 20 nt, Homo sapiens
  source 1..20: mol_type = other RNA
ccgagggtcgtagtctcgca

SEQ ID NO: 3633 - RNA, 20 nt, Homo sapiens
  source 1..20: mol_type = other RNA
ctcgctatcccggatcatga

SEQ ID NO: 3634 - RNA, 20 nt, Homo sapiens
  source 1..20: mol_type = other RNA
aatggcctcgtaatcataca

SEQ ID NO: 3635 - RNA, 20 nt, Homo sapiens
  source 1..20: mol_type = other RNA
ccgtgcgagactacgaccct

SEQ ID NO: 3636 - RNA, 20 nt, Homo sapiens
  source 1..20: mol_type = other RNA
tgtctccagagagtcaacgc

SEQ ID NO: 3637 - RNA, 20 nt, Homo sapiens
  source 1..20: mol_type = other RNA
tcacggtatctccctgccga

SEQ ID NO: 3638 - RNA, 20 nt, Homo sapiens
  source 1..20: mol_type = other RNA
caagctggtcaaacttcatg

SEQ ID NO: 3639 - RNA, 20 nt, Homo sapiens
  source 1..20: mol_type = other RNA
ggttgccctgtatgattacg

SEQ ID NO: 3640 - RNA, 20 nt, Homo sapiens
  source 1..20: mol_type = other RNA
tccagcttgagggattcccg

SEQ ID NO: 3641 - RNA, 20 nt, Homo sapiens
  source 1..20: mol_type = other RNA
gctggtcaaacttcatgcgg

SEQ ID NO: 3642 - RNA, 20 nt, Homo sapiens
  source 1..20: mol_type = other RNA
gcacgtacacaggacagtgt

SEQ ID NO: 3643 - RNA, 20 nt, Homo sapiens
  source 1..20: mol_type = other RNA
aagatccggaccctggacaa

SEQ ID NO: 3644 - RNA, 20 nt, Homo sapiens
  source 1..20: mol_type = other RNA
gaagccagggagcatgtcgg

SEQ ID NO: 3645 - RNA, 20 nt, Homo sapiens
  source 1..20: mol_type = other RNA
tggggaagtctggatgggta

SEQ ID NO: 3646 - RNA, 20 nt, Homo sapiens
  source 1..20: mol_type = other RNA
aggctctgaggacatcatcg

SEQ ID NO: 3647 - RNA, 20 nt, Homo sapiens
  source 1..20: mol_type = other RNA
ggaccagatggtggtcctag

SEQ ID NO: 3648 - RNA, 20 nt, Homo sapiens
  source 1..20: mol_type = other RNA
tcccacatccaccatcaagc

SEQ ID NO: 3649 - RNA, 20 nt, Homo sapiens
  source 1..20: mol_type = other RNA
gaaggagcccagcatgttgc

SEQ ID NO: 3650 - RNA, 20 nt, Homo sapiens
  source 1..20: mol_type = other RNA
ccacataaaagacccgcccg

SEQ ID NO: 3651 - RNA, 20 nt, Homo sapiens
  source 1..20: mol_type = other RNA
caaaattgcgagcatcccgt

SEQ ID NO: 3652 - RNA, 20 nt, Homo sapiens
  source 1..20: mol_type = other RNA
cttctcctcgcaagacgacg

SEQ ID NO: 3653 - RNA, 20 nt, Homo sapiens
  source 1..20: mol_type = other RNA
gcacattctactcaccaatg

SEQ ID NO: 3654 - RNA, 20 nt, Homo sapiens
  source 1..20: mol_type = other RNA
gatgtgtctaccctggagca

SEQ ID NO: 3655 - RNA, 20 nt, Homo sapiens
  source 1..20: mol_type = other RNA
gcggatgtagtgtgtccgcg

SEQ ID NO: 3656 - RNA, 20 nt, Homo sapiens
  source 1..20: mol_type = other RNA
acatgattctgaaagtccga

SEQ ID NO: 3657 - RNA, 20 nt, Homo sapiens
  source 1..20: mol_type = other RNA
cggatggcatgcggagatcg

SEQ ID NO: 3658 - RNA, 20 nt, Homo sapiens
  source 1..20: mol_type = other RNA
agcgaaccattgcaacagag

SEQ ID NO: 3659 - RNA, 20 nt, Homo sapiens
  source 1..20: mol_type = other RNA
tcatgctgaaaatacctggg

SEQ ID NO: 3660 - RNA, 20 nt, Homo sapiens
  source 1..20: mol_type = other RNA
ggagaacagcgcgttcgagt

SEQ ID NO: 3661 - RNA, 20 nt, Homo sapiens
  source 1..20: mol_type = other RNA
gcaggacgtgctgtagcacg

SEQ ID NO: 3662 - RNA, 20 nt, Homo sapiens
  source 1..20: mol_type = other RNA
ggaaggtctggaatcccccg

SEQ ID NO: 3663 - RNA, 20 nt, Homo sapiens
  source 1..20: mol_type = other RNA
aagtggtagctcgactgttg

SEQ ID NO: 3664 - RNA, 20 nt, Homo sapiens
  source 1..20: mol_type = other RNA
gagtataggacattcaccta

SEQ ID NO: 3665 - RNA, 20 nt, Homo sapiens
  source 1..20: mol_type = other RNA
aggtggttgtgcggttcacg

SEQ ID NO: 3666 - RNA, 20 nt, Homo sapiens
  source 1..20: mol_type = other RNA
agcaaccacccccagtgtca

SEQ ID NO: 3667 - RNA, 20 nt, Homo sapiens
  source 1..20: mol_type = other RNA
catccactgggacataaagg

SEQ ID NO: 3668 - RNA, 20 nt, Homo sapiens
  source 1..20: mol_type = other RNA
tcagtcacaggtttacccta

SEQ ID NO: 3669 - RNA, 20 nt, Homo sapiens
  source 1..20: mol_type = other RNA
gagatcaaaacggaccagca

SEQ ID NO: 3670 - RNA, 20 nt, Homo sapiens
  source 1..20: mol_type = other RNA
atgcggatgtagtgtgtccg

SEQ ID NO: 3671 - RNA, 20 nt, Homo sapiens
  source 1..20: mol_type = other RNA
ggaagcagcagtcatcacgg

SEQ ID NO: 3672 - RNA, 20 nt, Homo sapiens
  source 1..20: mol_type = other RNA
gatgagaccgtccaaggaca

SEQ ID NO: 3673 - RNA, 20 nt, Homo sapiens
  source 1..20: mol_type = other RNA
aggacagagaagagcccgag

SEQ ID NO: 3674 - RNA, 20 nt, Homo sapiens
  source 1..20: mol_type = other RNA
gtcccacagagaccatgccc

SEQ ID NO: 3675 - RNA, 20 nt, Homo sapiens
  source 1..20: mol_type = other RNA
caggcaatctatacctgcgg

SEQ ID NO: 3676 - RNA, 20 nt, Homo sapiens
  source 1..20: mol_type = other RNA
ctctactatgaagcactgtg

SEQ ID NO: 3677 - RNA, 20 nt, Homo sapiens
  source 1..20: mol_type = other RNA
agaggagtgcaaattcaaca

SEQ ID NO: 3678 - RNA, 20 nt, Homo sapiens
  source 1..20: mol_type = other RNA
cctaccttgtagttaactgg

SEQ ID NO: 3679 - RNA, 20 nt, Homo sapiens
  source 1..20: mol_type = other RNA
gaagtctaacgcttgcagag

SEQ ID NO: 3680 - RNA, 20 nt, Homo sapiens
  source 1..20: mol_type = other RNA
tgggccaccagttaactaca

SEQ ID NO: 3681 - RNA, 20 nt, Homo sapiens
  source 1..20: mol_type = other RNA
agacaggcaatctatacctg

SEQ ID NO: 3682 - RNA, 20 nt, Homo sapiens
  source 1..20: mol_type = other RNA
gtcaagttcatccaacacgc

SEQ ID NO: 3683 - RNA, 20 nt, Homo sapiens
  source 1..20: mol_type = other RNA
ggagtgcaaattcaacaagg

SEQ ID NO: 3684 - RNA, 20 nt, Homo sapiens
  source 1..20: mol_type = other RNA
tagagggtcacattgacaag

SEQ ID NO: 3685 - RNA, 20 nt, Homo sapiens
  source 1..20: mol_type = other RNA
ggtgccctacggaaacgcac

SEQ ID NO: 3686 - RNA, 20 nt, Homo sapiens
  source 1..20: mol_type = other RNA
tgaggggcgtcactcactag

SEQ ID NO: 3687 - RNA, 20 nt, Homo sapiens
  source 1..20: mol_type = other RNA
ccaccagttaactacaaggt

SEQ ID NO: 3688 - RNA, 20 nt, Homo sapiens
  source 1..20: mol_type = other RNA
agaagtctaacgcttgcaga

SEQ ID NO: 3689 - RNA, 20 nt, Homo sapiens
  source 1..20: mol_type = other RNA
acaggcaatctatacctgcg

SEQ ID NO: 3690 - RNA, 20 nt, Homo sapiens
  source 1..20: mol_type = other RNA
aagaagtctaacgcttgcag

SEQ ID NO: 3691 - RNA, 20 nt, Homo sapiens
  source 1..20: mol_type = other RNA
cgcacagtgcttcatagtag

SEQ ID NO: 3692 - RNA, 20 nt, Homo sapiens
  source 1..20: mol_type = other RNA
gctcccggatcaggaaggct

SEQ ID NO: 3693 - RNA, 20 nt, Homo sapiens
  source 1..20: mol_type = other RNA
gcacagtgcttcatagtaga

SEQ ID NO: 3694 - RNA, 20 nt, Homo sapiens
  source 1..20: mol_type = other RNA
tcatccaacacgcaggcctg

SEQ ID NO: 3695 - RNA, 20 nt, Homo sapiens
  source 1..20: mol_type = other RNA
catgcagacaatggtcagga

SEQ ID NO: 3696 - RNA, 20 nt, Homo sapiens
  source 1..20: mol_type = other RNA
gacaggcaatctatacctgc

SEQ ID NO: 3697 - RNA, 20 nt, Homo sapiens
  source 1..20: mol_type = other RNA
aggaacaaaatgtcagtggc

SEQ ID NO: 3698 - RNA, 20 nt, Homo sapiens
  source 1..20: mol_type = other RNA
tccgggagctcttcccaaca

SEQ ID NO: 3699 - RNA, 20 nt, Homo sapiens
  source 1..20: mol_type = other RNA
gccaccgctgctgctgctgc

SEQ ID NO: 3700 - RNA, 20 nt, Homo sapiens
  source 1..20: mol_type = other RNA
cacattccaaatactgacgg

SEQ ID NO: 3701 - RNA, 20 nt, Homo sapiens
  source 1..20: mol_type = other RNA
ggtgatatcagaccccacta

SEQ ID NO: 3702 - RNA, 20 nt, Homo sapiens
  source 1..20: mol_type = other RNA
tgacactatggggctagatg

SEQ ID NO: 3703 - RNA, 20 nt, Homo sapiens
  source 1..20: mol_type = other RNA
tataagtctagtgttcatgg

SEQ ID NO: 3704 - RNA, 20 nt, Homo sapiens
  source 1..20: mol_type = other RNA
ggtgtgtcgtttatcgaaaa

SEQ ID NO: 3705 - RNA, 20 nt, Homo sapiens
  source 1..20: mol_type = other RNA
tatcagaccccactacggct

SEQ ID NO: 3706 - RNA, 20 nt, Homo sapiens
  source 1..20: mol_type = other RNA
ttgttatagtacatccctga

SEQ ID NO: 3707 - RNA, 20 nt, Homo sapiens
  source 1..20: mol_type = other RNA
atatcaccagcataaccgag

SEQ ID NO: 3708 - RNA, 20 nt, Homo sapiens
  source 1..20: mol_type = other RNA
tgtgactggccaagccgtag

SEQ ID NO: 3709 - RNA, 20 nt, Homo sapiens
  source 1..20: mol_type = other RNA
tctgaaaccaagtctgcata

SEQ ID NO: 3710 - RNA, 20 nt, Homo sapiens
  source 1..20: mol_type = other RNA
ttgtatgccagacagatatc

SEQ ID NO: 3711 - RNA, 20 nt, Homo sapiens
  source 1..20: mol_type = other RNA
ttatgttgtgtgacactatg

SEQ ID NO: 3712 - RNA, 20 nt, Homo sapiens
  source 1..20: mol_type = other RNA
cagagccaaatgattcccta

SEQ ID NO: 3713 - RNA, 20 nt, Homo sapiens
  source 1..20: mol_type = other RNA
tttatgttgtgtgacactat

SEQ ID NO: 3714 - RNA, 20 nt, Homo sapiens
  source 1..20: mol_type = other RNA
ataacctagacgacataaag

SEQ ID NO: 3715 - RNA, 20 nt, Homo sapiens
  source 1..20: mol_type = other RNA
agggaaataacttacccgct

SEQ ID NO: 3716 - RNA, 20 nt, Homo sapiens
  source 1..20: mol_type = other RNA
tatcaccagcataaccgagc

SEQ ID NO: 3717 - RNA, 20 nt, Homo sapiens
  source 1..20: mol_type = other RNA
acttacccgctcggttatgc

SEQ ID NO: 3718 - RNA, 20 nt, Homo sapiens
  source 1..20: mol_type = other RNA
cttcacattccaaatactga

SEQ ID NO: 3719 - RNA, 20 nt, Homo sapiens
  source 1..20: mol_type = other RNA
caagaatccaacttactctc

SEQ ID NO: 3720 - RNA, 20 nt, Homo sapiens
  source 1..20: mol_type = other RNA
tgactggccaagccgtagtg

SEQ ID NO: 3721 - RNA, 20 nt, Homo sapiens
  source 1..20: mol_type = other RNA
atgattgtagcctttatgct

SEQ ID NO: 3722 - RNA, 20 nt, Homo sapiens
  source 1..20: mol_type = other RNA
gtgacactatggggctagat

SEQ ID NO: 3723 - RNA, 20 nt, Homo sapiens
  source 1..20: mol_type = other RNA
gttgaaagatgcagccgtca

SEQ ID NO: 3724 - RNA, 20 nt, Homo sapiens
  source 1..20: mol_type = other RNA
atagtgtcacacaacataaa

SEQ ID NO: 3725 - RNA, 20 nt, Homo sapiens
  source 1..20: mol_type = other RNA
tggtctgcgatcctgaatgg

SEQ ID NO: 3726 - RNA, 20 nt, Homo sapiens
  source 1..20: mol_type = other RNA
ctggtctgcgatcctgaatg

SEQ ID NO: 3727 - RNA, 20 nt, Homo sapiens
  source 1..20: mol_type = other RNA
gctgctcttcacttgcagtg

SEQ ID NO: 3728 - RNA, 20 nt, Homo sapiens
  source 1..20: mol_type = other RNA
acctcctccgacggccatga

SEQ ID NO: 3729 - RNA, 20 nt, Homo sapiens
  source 1..20: mol_type = other RNA
tgctcggagagctcggacag

SEQ ID NO: 3730 - RNA, 20 nt, Homo sapiens
  source 1..20: mol_type = other RNA
ctgaccttcatggccgtcgg

SEQ ID NO: 3731 - RNA, 20 nt, Homo sapiens
  source 1..20: mol_type = other RNA
tctgcgatcctgaatggggg

SEQ ID NO: 3732 - RNA, 20 nt, Homo sapiens
  source 1..20: mol_type = other RNA
tgcaggtaagaaaaagtgct

SEQ ID NO: 3733 - RNA, 20 nt, Homo sapiens
  source 1..20: mol_type = other RNA
gccctgaccttcatggccgt

SEQ ID NO: 3734 - RNA, 20 nt, Homo sapiens
  source 1..20: mol_type = other RNA
cggcatcgcggccaactcgg

SEQ ID NO: 3735 - RNA, 20 nt, Homo sapiens
  source 1..20: mol_type = other RNA
accttcatggccgtcggagg

SEQ ID NO: 3736 - RNA, 20 nt, Homo sapiens
  source 1..20: mol_type = other RNA
cgcagaccagctcatcagcg

SEQ ID NO: 3737 - RNA, 20 nt, Homo sapiens
  source 1..20: mol_type = other RNA
cagcgaggcagccaccgagt

SEQ ID NO: 3738 - RNA, 20 nt, Homo sapiens
  source 1..20: mol_type = other RNA
gaaaaagtgctcggagagct

SEQ ID NO: 3739 - RNA, 20 nt, Homo sapiens
  source 1..20: mol_type = other RNA
tcatggccgtcggaggaggt

SEQ ID NO: 3740 - RNA, 20 nt, Homo sapiens
  source 1..20: mol_type = other RNA
cagcggctccgggttctgga

SEQ ID NO: 3741 - RNA, 20 nt, Homo sapiens
  source 1..20: mol_type = other RNA
tccagacccacctcctccga

SEQ ID NO: 3742 - RNA, 20 nt, Homo sapiens
  source 1..20: mol_type = other RNA
gctcttcacttgcagtgggg

SEQ ID NO: 3743 - RNA, 20 nt, Homo sapiens
  source 1..20: mol_type = other RNA
tgctgctcttcacttgcagt

SEQ ID NO: 3744 - RNA, 20 nt, Homo sapiens
  source 1..20: mol_type = other RNA
cgccggcatcgcggccaact

SEQ ID NO: 3745 - RNA, 20 nt, Homo sapiens
  source 1..20: mol_type = other RNA
agctggtctgcgatcctgaa

SEQ ID NO: 3746 - RNA, 20 nt, Homo sapiens
  source 1..20: mol_type = other RNA
gctggtctgcgatcctgaat

SEQ ID NO: 3747 - RNA, 20 nt, Homo sapiens
  source 1..20: mol_type = other RNA
ctccaggactcgcagtcgcc

SEQ ID NO: 3748 - RNA, 20 nt, Homo sapiens
  source 1..20: mol_type = other RNA
gtggaggcaggtgagaatgc

SEQ ID NO: 3749 - RNA, 20 nt, Homo sapiens
  source 1..20: mol_type = other RNA
ctgcccgcgctgggcttcac

SEQ ID NO: 3750 - RNA, 20 nt, Homo sapiens
  source 1..20: mol_type = other RNA
tgatcacggtggaccttgga

SEQ ID NO: 3751 - RNA, 20 nt, Homo sapiens
  source 1..20: mol_type = other RNA
atgttgatcacggtggacct

SEQ ID NO: 3752 - RNA, 20 nt, Homo sapiens
  source 1..20: mol_type = other RNA
gctgtggatgttgatcacgg

SEQ ID NO: 3753 - RNA, 20 nt, Homo sapiens
  source 1..20: mol_type = other RNA
cccccagcaccatccttcca

SEQ ID NO: 3754 - RNA, 20 nt, Homo sapiens
  source 1..20: mol_type = other RNA
gcacaaggaggaacatgagg

SEQ ID NO: 3755 - RNA, 20 nt, Homo sapiens
  source 1..20: mol_type = other RNA
ctcgctgtggatgttgatca

SEQ ID NO: 3756 - RNA, 20 nt, Homo sapiens
  source 1..20: mol_type = other RNA
agcattcgcctactccgtga

SEQ ID NO: 3757 - RNA, 20 nt, Homo sapiens
  source 1..20: mol_type = other RNA
acagcaccagttcaagaaga

SEQ ID NO: 3758 - RNA, 20 nt, Homo sapiens
  source 1..20: mol_type = other RNA
catacgcaccttcacggagt

SEQ ID NO: 3759 - RNA, 20 nt, Homo sapiens
  source 1..20: mol_type = other RNA
gacagcaccagttcaagaag

SEQ ID NO: 3760 - RNA, 20 nt, Homo sapiens
  source 1..20: mol_type = other RNA
cacggtggaccttggaagga

SEQ ID NO: 3761 - RNA, 20 nt, Homo sapiens
  source 1..20: mol_type = other RNA
cttggaaggatggtgctggg

SEQ ID NO: 3762 - RNA, 20 nt, Homo sapiens
  source 1..20: mol_type = other RNA
atcttcctgtccctagactg

SEQ ID NO: 3763 - RNA, 20 nt, Homo sapiens
  source 1..20: mol_type = other RNA
ttcttgaactggtgctgtct

SEQ ID NO: 3764 - RNA, 20 nt, Homo sapiens
  source 1..20: mol_type = other RNA
gatggttggcgacgtgaccg

SEQ ID NO: 3765 - RNA, 20 nt, Homo sapiens
  source 1..20: mol_type = other RNA
tcaacaccctcttcttgaac

SEQ ID NO: 3766 - RNA, 20 nt, Homo sapiens
  source 1..20: mol_type = other RNA
ccttggaaggatggtgctgg

SEQ ID NO: 3767 - RNA, 20 nt, Homo sapiens
  source 1..20: mol_type = other RNA
accttggaaggatggtgctg

SEQ ID NO: 3768 - RNA, 20 nt, Homo sapiens
  source 1..20: mol_type = other RNA
cagggccatacgcaccttca

SEQ ID NO: 3769 - RNA, 20 nt, Homo sapiens
  source 1..20: mol_type = other RNA
cttcttgaactggtgctgtc

SEQ ID NO: 3770 - RNA, 20 nt, Homo sapiens
  source 1..20: mol_type = other RNA
gaccttggaaggatggtgct

SEQ ID NO: 3771 - RNA, 20 nt, Homo sapiens
  source 1..20: mol_type = other RNA
ctctcccccagtctagggac

SEQ ID NO: 3772 - RNA, 20 nt, Homo sapiens
  source 1..20: mol_type = other RNA
agatggttggcgacgtgacc

SEQ ID NO: 3773 - RNA, 20 nt, Homo sapiens
  source 1..20: mol_type = other RNA
ggaccttggaaggatggtgc

SEQ ID NO: 3774 - RNA, 20 nt, Homo sapiens
  source 1..20: mol_type = other RNA
tcaagaagagggtgttgaac

SEQ ID NO: 3775 - RNA, 20 nt, Homo sapiens
  source 1..20: mol_type = other RNA
gatgctcaaggaggagcacg

SEQ ID NO: 3776 - RNA, 20 nt, Homo sapiens
  source 1..20: mol_type = other RNA
gcacgaggtggctgtgctgg

SEQ ID NO: 3777 - RNA, 20 nt, Homo sapiens
  source 1..20: mol_type = other RNA
ggcagcaggggttcatgaag

SEQ ID NO: 3778 - RNA, 20 nt, Homo sapiens
  source 1..20: mol_type = other RNA
atgtggatcacggtggacgt

SEQ ID NO: 3779 - RNA, 20 nt, Homo sapiens
  source 1..20: mol_type = other RNA
agcattcgcctactccgtga

SEQ ID NO: 3780 - RNA, 20 nt, Homo sapiens
  source 1..20: mol_type = other RNA
catacgcaccttcacggagt

SEQ ID NO: 3781 - RNA, 20 nt, Homo sapiens
  source 1..20: mol_type = other RNA
gtggatcacggtggacgtcg

SEQ ID NO: 3782 - RNA, 20 nt, Homo sapiens
  source 1..20: mol_type = other RNA
agcacgaggtggctgtgctg

SEQ ID NO: 3783 - RNA, 20 nt, Homo sapiens
  source 1..20: mol_type = other RNA
cggtggacgtcgggggagca

SEQ ID NO: 3784 - RNA, 20 nt, Homo sapiens
  source 1..20: mol_type = other RNA
tggatcacggtggacgtcgg

SEQ ID NO: 3785 - RNA, 20 nt, Homo sapiens
  source 1..20: mol_type = other RNA
gggggctggccactgttgac

SEQ ID NO: 3786 - RNA, 20 nt, Homo sapiens
  source 1..20: mol_type = other RNA
aggcgaatgctatgaagccc

SEQ ID NO: 3787 - RNA, 20 nt, Homo sapiens
  source 1..20: mol_type = other RNA
tgtggatcacggtggacgtc

SEQ ID NO: 3788 - RNA, 20 nt, Homo sapiens
  source 1..20: mol_type = other RNA
atcttcctgtccctagactg

SEQ ID NO: 3789 - RNA, 20 nt, Homo sapiens
  source 1..20: mol_type = other RNA
gcatctcatagttggggggc

SEQ ID NO: 3790 - RNA, 20 nt, Homo sapiens
  source 1..20: mol_type = other RNA
gagcacgaggtggctgtgct

SEQ ID NO: 3791 - RNA, 20 nt, Homo sapiens
  source 1..20: mol_type = other RNA
ggagcacgaggtggctgtgc

SEQ ID NO: 3792 - RNA, 20 nt, Homo sapiens
  source 1..20: mol_type = other RNA
ctcgctgcggatgtggatca

SEQ ID NO: 3793 - RNA, 20 nt, Homo sapiens
  source 1..20: mol_type = other RNA
ctctcccccagtctagggac

SEQ ID NO: 3794 - RNA, 20 nt, Homo sapiens
  source 1..20: mol_type = other RNA
acggtggacgtcgggggagc

SEQ ID NO: 3795 - RNA, 20 nt, Homo sapiens
  source 1..20: mol_type = other RNA
tggggccatacgcaccttca

SEQ ID NO: 3796 - RNA, 20 nt, Homo sapiens
  source 1..20: mol_type = other RNA
atctcctctcccccagtcta

SEQ ID NO: 3797 - RNA, 20 nt, Homo sapiens
  source 1..20: mol_type = other RNA
catcttcctgtccctagact

SEQ ID NO: 3798 - RNA, 20 nt, Homo sapiens
  source 1..20: mol_type = other RNA
catctcctctcccccagtct

SEQ ID NO: 3799 - RNA, 20 nt, Homo sapiens
  source 1..20: mol_type = other RNA
ccatcttcctgtccctagac

SEQ ID NO: 3800 - RNA, 20 nt, Homo sapiens
  source 1..20: mol_type = other RNA
agcattcgcgtactccgtga

SEQ ID NO: 3801 - RNA, 20 nt, Homo sapiens
  source 1..20: mol_type = other RNA
tgaacagggaccagaccaca

SEQ ID NO: 3802 - RNA, 20 nt, Homo sapiens
  source 1..20: mol_type = other RNA
gaccacatggtcaggcacgg

SEQ ID NO: 3803 - RNA, 20 nt, Homo sapiens
  source 1..20: mol_type = other RNA
gacctccgtgcctgaccatg

SEQ ID NO: 3804 - RNA, 20 nt, Homo sapiens
  source 1..20: mol_type = other RNA
ccagaccacatggtcaggca

SEQ ID NO: 3805 - RNA, 20 nt, Homo sapiens
  source 1..20: mol_type = other RNA
ttgagcatctcgtagttggg

SEQ ID NO: 3806 - RNA, 20 nt, Homo sapiens
  source 1..20: mol_type = other RNA
caactacgagatgctcaagg

SEQ ID NO: 3807 - RNA, 20 nt, Homo sapiens
  source 1..20: mol_type = other RNA
tcccaactacgagatgctca

SEQ ID NO: 3808 - RNA, 20 nt, Homo sapiens
  source 1..20: mol_type = other RNA
tggatcacggtggacatcgg

SEQ ID NO: 3809 - RNA, 20 nt, Homo sapiens
  source 1..20: mol_type = other RNA
gtggatcacggtggacatcg

SEQ ID NO: 3810 - RNA, 20 nt, Homo sapiens
  source 1..20: mol_type = other RNA
agggaccagaccacatggtc

SEQ ID NO: 3811 - RNA, 20 nt, Homo sapiens
  source 1..20: mol_type = other RNA
atgtggatcacggtggacat

SEQ ID NO: 3812 - RNA, 20 nt, Homo sapiens
  source 1..20: mol_type = other RNA
ggcagcaggtgttcatgaag

SEQ ID NO: 3813 - RNA, 20 nt, Homo sapiens
  source 1..20: mol_type = other RNA
gcagcaggtgttcatgaaga

SEQ ID NO: 3814 - RNA, 20 nt, Homo sapiens
  source 1..20: mol_type = other RNA
gcaggaagtggctatgctgg

SEQ ID NO: 3815 - RNA, 20 nt, Homo sapiens
  source 1..20: mol_type = other RNA
agcaggaagtggctatgctg

SEQ ID NO: 3816 - RNA, 20 nt, Homo sapiens
  source 1..20: mol_type = other RNA
ccgtgcctgaccatgtggtc

SEQ ID NO: 3817 - RNA, 20 nt, Homo sapiens
  source 1..20: mol_type = other RNA
cggtggacatcgggggagca

SEQ ID NO: 3818 - RNA, 20 nt, Homo sapiens
  source 1..20: mol_type = other RNA
gccgctgttgacaggagaga

SEQ ID NO: 3819 - RNA, 20 nt, Homo sapiens
  source 1..20: mol_type = other RNA
acgcgaatgctatgaagccc

SEQ ID NO: 3820 - RNA, 20 nt, Homo sapiens
  source 1..20: mol_type = other RNA
tccttgagcatctcgtagtt

SEQ ID NO: 3821 - RNA, 20 nt, Homo sapiens
  source 1..20: mol_type = other RNA
gcatctcgtagttgggaggc

SEQ ID NO: 3822 - RNA, 20 nt, Homo sapiens
  source 1..20: mol_type = other RNA
atcttcctgtccctagactg

SEQ ID NO: 3823 - RNA, 20 nt, Homo sapiens
  source 1..20: mol_type = other RNA
gagcaggaagtggctatgct

SEQ ID NO: 3824 - RNA, 20 nt, Homo sapiens
  source 1..20: mol_type = other RNA
ttcatgaacacctgctgcct

SEQ ID NO: 3825 - RNA, 20 nt, Homo sapiens
  source 1..20: mol_type = other RNA
cttataataaatatggtccg

SEQ ID NO: 3826 - RNA, 20 nt, Homo sapiens
  source 1..20: mol_type = other RNA
ttatttcagataatgcaccc

SEQ ID NO: 3827 - RNA, 20 nt, Homo sapiens
  source 1..20: mol_type = other RNA
ttacagccatacctctaggc

SEQ ID NO: 3828 - RNA, 20 nt, Homo sapiens
  source 1..20: mol_type = other RNA
atagttacagccatacctct

SEQ ID NO: 3829 - RNA, 20 nt, Homo sapiens
  source 1..20: mol_type = other RNA
tcagtcatatcttcaaatag

SEQ ID NO: 3830 - RNA, 20 nt, Homo sapiens
  source 1..20: mol_type = other RNA
gaatcctcctgataacatca

SEQ ID NO: 3831 - RNA, 20 nt, Homo sapiens
  source 1..20: mol_type = other RNA
gtatccttgatgttatcagg

SEQ ID NO: 3832 - RNA, 20 nt, Homo sapiens
  source 1..20: mol_type = other RNA
atgactgattctgactgtag

SEQ ID NO: 3833 - RNA, 20 nt, Homo sapiens
  source 1..20: mol_type = other RNA
caagttctcttcattgacca

SEQ ID NO: 3834 - RNA, 20 nt, Homo sapiens
  source 1..20: mol_type = other RNA
tacttataataaatatggtc

SEQ ID NO: 3835 - RNA, 20 nt, Homo sapiens
  source 1..20: mol_type = other RNA
tataaagatagccagcctag

SEQ ID NO: 3836 - RNA, 20 nt, Homo sapiens
  source 1..20: mol_type = other RNA
caaatagaggccgatttcct

SEQ ID NO: 3837 - RNA, 20 nt, Homo sapiens
  source 1..20: mol_type = other RNA
acttataataaatatggtcc

SEQ ID NO: 3838 - RNA, 20 nt, Homo sapiens
  source 1..20: mol_type = other RNA
tttgtatccttgatgttatc

SEQ ID NO: 3839 - RNA, 20 nt, Homo sapiens
  source 1..20: mol_type = other RNA
tcttcattgaccaaggaaat

SEQ ID NO: 3840 - RNA, 20 nt, Homo sapiens
  source 1..20: mol_type = other RNA
tgccaaagtaatctgattcc

SEQ ID NO: 3841 - RNA, 20 nt, Homo sapiens
  source 1..20: mol_type = other RNA
aatgtttattgtagaaaacc

SEQ ID NO: 3842 - RNA, 20 nt, Homo sapiens
  source 1..20: mol_type = other RNA
tacgctttactttataggta

SEQ ID NO: 3843 - RNA, 20 nt, Homo sapiens
  source 1..20: mol_type = other RNA
agatagccagcctagaggta

SEQ ID NO: 3844 - RNA, 20 nt, Homo sapiens
  source 1..20: mol_type = other RNA
aaggctcagtcttaccttaa

SEQ ID NO: 3845 - RNA, 20 nt, Homo sapiens
  source 1..20: mol_type = other RNA
cttggtcaatgaagagaact

SEQ ID NO: 3846 - RNA, 20 nt, Homo sapiens
  source 1..20: mol_type = other RNA
atacatacttataataaata

SEQ ID NO: 3847 - RNA, 20 nt, Homo sapiens
  source 1..20: mol_type = other RNA
cccctcttagctgaagatga

SEQ ID NO: 3848 - RNA, 20 nt, Homo sapiens
  source 1..20: mol_type = other RNA
aacctggaatcagattactt

SEQ ID NO: 3849 - RNA, 20 nt, Homo sapiens
  source 1..20: mol_type = other RNA
agacaattgcatcaactttg

SEQ ID NO: 3850 - RNA, 21 nt, Homo sapiens
  source 1..21: mol_type = other RNA
gatggtgactggcttattgct

SEQ ID NO: 3851 - RNA, 21 nt, Homo sapiens
  source 1..21: mol_type = other RNA
tctgcttagacacaatcctag

SEQ ID NO: 3852 - RNA, 21 nt, Homo sapiens
  source 1..21: mol_type = other RNA
taggttccaagcaggagaacc

SEQ ID NO: 3853 - RNA, 21 nt, Homo sapiens
  source 1..21: mol_type = other RNA
tcggttaagactgatgcagcc

SEQ ID NO: 3854 - RNA, 21 nt, Homo sapiens
  source 1..21: mol_type = other RNA
atatgtagaggctgtgatcat

SEQ ID NO: 3855 - RNA, 21 nt, Homo sapiens
  source 1..21: mol_type = other RNA
tggggttcatcttaaaatagt

SEQ ID NO: 3856 - RNA, 21 nt, Homo sapiens
  source 1..21: mol_type = other RNA
acaaatcttcacaaatttgtg

SEQ ID NO: 3857 - RNA, 23 nt, Homo sapiens
  source 1..23: mol_type = other RNA
cccatgtgccgaacactcttggc

SEQ ID NO: 3858 - RNA, 23 nt, Homo sapiens
  source 1..23: mol_type = other RNA
ggttccaagcaggagaaccagga

SEQ ID NO: 3859 - RNA, 23 nt, Homo sapiens
  source 1..23: mol_type = other RNA
caggtatatccggagcaataagc

SEQ ID NO: 3860 - RNA, 23 nt, Homo sapiens
  source 1..23: mol_type = other RNA
gatacccaccctcccggctgcat

SEQ ID NO: 3861 - RNA, 23 nt, Homo sapiens
  source 1..23: mol_type = other RNA
tcaggatcctagaaaacttctct

SEQ ID NO: 3862 - RNA, 23 nt, Homo sapiens
  source 1..23: mol_type = other RNA
gtatattactctacattgtccca

SEQ ID NO: 3863 - RNA, 23 nt, Homo sapiens
  source 1..23: mol_type = other RNA
gtgtccaactgaaaccaaagcaa

SEQ ID NO: 3864 - RNA, 23 nt, Homo sapiens
  source 1..23: mol_type = other RNA
aaaaccggcagagtttacccagc

SEQ ID NO: 3865 - RNA, 23 nt, Homo sapiens
  source 1..23: mol_type = other RNA
gagggctgctgaagtatcaaact

SEQ ID NO: 3866 - RNA, 23 nt, Homo sapiens
  source 1..23: mol_type = other RNA
ggtcatgagtcatccctcagatg

SEQ ID NO: 3867 - RNA, 23 nt, Homo sapiens
  source 1..23: mol_type = other RNA
tggaaaaccttcttgctgtataa

SEQ ID NO: 3868 - RNA, 23 nt, Homo sapiens
  source 1..23: mol_type = other RNA
tcacctgagaaaatacagatagt

SEQ ID NO: 3869 - RNA, 23 nt, Homo sapiens
  source 1..23: mol_type = other RNA
ggcacagtacaggcacaaaggtc

SEQ ID NO: 3870 - RNA, 23 nt, Homo sapiens
  source 1..23: mol_type = other RNA
tatggaagagcccagattccaag

SEQ ID NO: 3871 - RNA, 23 nt, Homo sapiens
  source 1..23: mol_type = other RNA
catgacatctgagggatgactca

SEQ ID NO: 3872 - RNA, 23 nt, Homo sapiens
  source 1..23: mol_type = other RNA
taactatgatatcttctggtata

SEQ ID NO: 3873 - RNA, 20 nt, Homo sapiens
  source 1..20: mol_type = other RNA
ttacataatctggatgaagc

SEQ ID NO: 3874 - RNA, 20 nt, Homo sapiens
  source 1..20: mol_type = other RNA
ggctgctgcattacataatc

SEQ ID NO: 3875 - RNA, 23 nt, Homo sapiens
  source 1..23: mol_type = other RNA
taatgcagatacactgggacaat

SEQ ID NO: 3876 - RNA, 23 nt, Homo sapiens
  source 1..23: mol_type = other RNA
tccaacaatctcctggttctcct

SEQ ID NO: 3877 - RNA, 23 nt, Homo sapiens
  source 1..23: mol_type = other RNA
cagagtttctaactatgatatct

SEQ ID NO: 3878 - RNA, 23 nt, Homo sapiens
  source 1..23: mol_type = other RNA
cccagcacaaatttgtgaagatt

SEQ ID NO: 3879 - RNA, 23 nt, Homo sapiens
  source 1..23: mol_type = other RNA
cttaccagagtatttctcagaac

SEQ ID NO: 3880 - RNA, 23 nt, Homo sapiens
  source 1..23: mol_type = other RNA
tagttcctggcctgacaggggtc

SEQ ID NO: 3881 - RNA, 23 nt, Homo sapiens
  source 1..23: mol_type = other RNA
gggttcatcttaaaatagtagga

SEQ ID NO: 3882 - RNA, 23 nt, Homo sapiens
  source 1..23: mol_type = other RNA
ttgaactgaatgcagcaagatac

SEQ ID NO: 3883 - RNA, 23 nt, Homo sapiens
  source 1..23: mol_type = other RNA
atatcttgtggctttctcacctg

SEQ ID NO: 3884 - RNA, 23 nt, Homo sapiens
  source 1..23: mol_type = other RNA
atattacctgtggtgttactatc

SEQ ID NO: 3885 - RNA, 23 nt, Homo sapiens
  source 1..23: mol_type = other RNA
actgtaattcactgagaagttga

SEQ ID NO: 3886 - RNA, 23 nt, Homo sapiens
  source 1..23: mol_type = other RNA
tgagtataccagaagatatcata

SEQ ID NO: 3887 - RNA, 23 nt, Homo sapiens
  source 1..23: mol_type = other RNA
atgacatctgagggatgactcat

SEQ ID NO: 3888 - RNA, 23 nt, Homo sapiens
  source 1..23: mol_type = other RNA
accttacttacccccaacatctg

SEQ ID NO: 3889 - RNA, 23 nt, Homo sapiens
  source 1..23: mol_type = other RNA
tcagtgaattacagtgaagactt

SEQ ID NO: 3890 - RNA, 23 nt, Homo sapiens
  source 1..23: mol_type = other RNA
taaacttaccctgaaacatgcaa

SEQ ID NO: 3891 - RNA, 23 nt, Homo sapiens
  source 1..23: mol_type = other RNA
ccctgaaacatgcaacgtcagca

SEQ ID NO: 3892 - RNA, 23 nt, Homo sapiens
  source 1..23: mol_type = other RNA
caaaaccggcagagtttacccag

SEQ ID NO: 3893 - RNA, 23 nt, Homo sapiens
  source 1..23: mol_type = other RNA
acctcaactgcagccttatcctt

SEQ ID NO: 3894 - RNA, 23 nt, Homo sapiens
  source 1..23: mol_type = other RNA
tgagagctggttcggttaagact

SEQ ID NO: 3895 - RNA, 23 nt, Homo sapiens
  source 1..23: mol_type = other RNA
accgaaccagctctcagaatatt

SEQ ID NO: 3896 - RNA, 23 nt, Homo sapiens
  source 1..23: mol_type = other RNA
tgcagagtttctaactatgatat

SEQ ID NO: 3897 - RNA, 23 nt, Homo sapiens
  source 1..23: mol_type = other RNA
tcatgatcacagcctctacatat

SEQ ID NO: 3898 - RNA, 23 nt, Homo sapiens
  source 1..23: mol_type = other RNA
tagtgtccaactgaaaccaaagc

SEQ ID NO: 3899 - RNA, 23 nt, Homo sapiens
  source 1..23: mol_type = other RNA
tggtatactcataacctcttctt

SEQ ID NO: 3900 - RNA, 20 nt, Homo sapiens
  source 1..20: mol_type = other RNA
agctgactaattattcggtg

SEQ ID NO: 3901 - RNA, 20 nt, Homo sapiens
  source 1..20: mol_type = other RNA
aggagtcagatgctgtttcg

SEQ ID NO: 3902 - RNA, 20 nt, Homo sapiens
  source 1..20: mol_type = other RNA
caggcaggacaaccattact

SEQ ID NO: 3903 - RNA, 20 nt, Homo sapiens
  source 1..20: mol_type = other RNA
ccagagcatccaaaagagtg

SEQ ID NO: 3904 - RNA, 20 nt, Homo sapiens
  source 1..20: mol_type = other RNA
gcaggcaggacaaccattac

SEQ ID NO: 3905 - RNA, 20 nt, Homo sapiens
  source 1..20: mol_type = other RNA
tgtcgccagcagctaaaaca

SEQ ID NO: 3906 - RNA, 20 nt, Homo sapiens
  source 1..20: mol_type = other RNA
gttcatgtattgctttgcgt

SEQ ID NO: 3907 - RNA, 20 nt, Homo sapiens
  source 1..20: mol_type = other RNA
aaagagtgtggagaccatca

SEQ ID NO: 3908 - RNA, 20 nt, Homo sapiens
  source 1..20: mol_type = other RNA
gtcgaagagcatcccagtaa

SEQ ID NO: 3909 - RNA, 20 nt, Homo sapiens
  source 1..20: mol_type = other RNA
acatgaactcatccaagtga

SEQ ID NO: 3910 - RNA, 20 nt, Homo sapiens
  source 1..20: mol_type = other RNA
gcgacagttcagccatcact

SEQ ID NO: 3911 - RNA, 20 nt, Homo sapiens
  source 1..20: mol_type = other RNA
cattcagatgtagcggataa

SEQ ID NO: 3912 - RNA, 20 nt, Homo sapiens
  source 1..20: mol_type = other RNA
ttctcttggctgttactgcc

SEQ ID NO: 3913 - RNA, 20 nt, Homo sapiens
  source 1..20: mol_type = other RNA
gaaatatacaagttatatct

SEQ ID NO: 3914 - RNA, 20 nt, Homo sapiens
  source 1..20: mol_type = other RNA
tgcaggtcattcagatgtag

SEQ ID NO: 3915 - RNA, 20 nt, Homo sapiens
  source 1..20: mol_type = other RNA
ctaaaacagggaagcgaaaa

SEQ ID NO: 3916 - RNA, 20 nt, Homo sapiens
  source 1..20: mol_type = other RNA
cgaaaagctgactaattatt

SEQ ID NO: 3917 - RNA, 20 nt, Homo sapiens
  source 1..20: mol_type = other RNA
tgaagtaaaaggagacaatt

SEQ ID NO: 3918 - RNA, 20 nt, Homo sapiens
  source 1..20: mol_type = other RNA
tacttacaaaatatttctta

SEQ ID NO: 3919 - RNA, 20 nt, Homo sapiens
  source 1..20: mol_type = other RNA
gacattcatgtcttccttga

SEQ ID NO: 3920 - RNA, 20 nt, Homo sapiens
  source 1..20: mol_type = other RNA
tttaaaaagtttgaagtaaa

SEQ ID NO: 3921 - RNA, 20 nt, Homo sapiens
  source 1..20: mol_type = other RNA
ctgtcgccagcagctaaaac

SEQ ID NO: 3922 - RNA, 20 nt, Homo sapiens
  source 1..20: mol_type = other RNA
tgatggtctccacactcttt

SEQ ID NO: 3923 - RNA, 20 nt, Homo sapiens
  source 1..20: mol_type = other RNA
ataaatactactaaggcaca

SEQ ID NO: 3924 - RNA, 20 nt, Homo sapiens
  source 1..20: mol_type = other RNA
tttaccattggaattaacca

SEQ ID NO: 3925 - RNA, 20 nt, Homo sapiens
  source 1..20: mol_type = other RNA
ggaggtttctggccaaactg

SEQ ID NO: 3926 - RNA, 20 nt, Homo sapiens
  source 1..20: mol_type = other RNA
ctgggtctggagtggccacg

SEQ ID NO: 3927 - RNA, 20 nt, Homo sapiens
  source 1..20: mol_type = other RNA
gcgctggacacatgctgagc

SEQ ID NO: 3928 - RNA, 20 nt, Homo sapiens
  source 1..20: mol_type = other RNA
tcaatctcttcagaagtgca

SEQ ID NO: 3929 - RNA, 20 nt, Homo sapiens
  source 1..20: mol_type = other RNA
agataaaaccagcacagtgg

SEQ ID NO: 3930 - RNA, 20 nt, Homo sapiens
  source 1..20: mol_type = other RNA
ggaccagggtagccacaagg

SEQ ID NO: 3931 - RNA, 20 nt, Homo sapiens
  source 1..20: mol_type = other RNA
gtgtcttaccatcataaaag

SEQ ID NO: 3932 - RNA, 20 nt, Homo sapiens
  source 1..20: mol_type = other RNA
tttggccagaaacctccccg

SEQ ID NO: 3933 - RNA, 20 nt, Homo sapiens
  source 1..20: mol_type = other RNA
cataaaagaggtctttctgg

SEQ ID NO: 3934 - RNA, 20 nt, Homo sapiens
  source 1..20: mol_type = other RNA
ggccacaggtctgcatccag

SEQ ID NO: 3935 - RNA, 20 nt, Homo sapiens
  source 1..20: mol_type = other RNA
agtcttcataaatactacta

SEQ ID NO: 3936 - RNA, 20 nt, Homo sapiens
  source 1..20: mol_type = other RNA
caatctcttcagaagtgcaa

SEQ ID NO: 3937 - RNA, 20 nt, Homo sapiens
  source 1..20: mol_type = other RNA
ccactcccaaaacctgctga

SEQ ID NO: 3938 - RNA, 20 nt, Homo sapiens
  source 1..20: mol_type = other RNA
tataccttggttaattccaa

SEQ ID NO: 3939 - RNA, 20 nt, Homo sapiens
  source 1..20: mol_type = other RNA
agtggaggcctgtttaccat

SEQ ID NO: 3940 - RNA, 20 nt, Homo sapiens
  source 1..20: mol_type = other RNA
ggtctggagtggccacgggg

SEQ ID NO: 3941 - RNA, 20 nt, Homo sapiens
  source 1..20: mol_type = other RNA
ggaggaccagggtagccaca

SEQ ID NO: 3942 - RNA, 20 nt, Homo sapiens
  source 1..20: mol_type = other RNA
tttgggagtggtgaaggcat

SEQ ID NO: 3943 - RNA, 20 nt, Homo sapiens
  source 1..20: mol_type = other RNA
ccaaactgaggtggtccagg

SEQ ID NO: 3944 - RNA, 20 nt, Homo sapiens
  source 1..20: mol_type = other RNA
gaaggcatgggaacattcct

SEQ ID NO: 3945 - RNA, 20 nt, Homo sapiens
  source 1..20: mol_type = other RNA
cccgtggccactccagaccc

SEQ ID NO: 3946 - RNA, 20 nt, Homo sapiens
  source 1..20: mol_type = other RNA
tggatgcagacctgtggccg

SEQ ID NO: 3947 - RNA, 20 nt, Homo sapiens
  source 1..20: mol_type = other RNA
cctctagaatgggagttgcc

SEQ ID NO: 3948 - RNA, 20 nt, Homo sapiens
  source 1..20: mol_type = other RNA
tgaggagagtctgcccattg

SEQ ID NO: 3949 - RNA, 20 nt, Homo sapiens
  source 1..20: mol_type = other RNA
tctgcccattgaggtcatgg

SEQ ID NO: 3950 - RNA, 20 nt, Homo sapiens
  source 1..20: mol_type = other RNA
tcagttcccatatggccacg

SEQ ID NO: 3951 - RNA, 20 nt, Homo sapiens
  source 1..20: mol_type = other RNA
agttcccatatggccacgag

SEQ ID NO: 3952 - RNA, 20 nt, Homo sapiens
  source 1..20: mol_type = other RNA
ggcatccaccatgacctcaa

SEQ ID NO: 3953 - RNA, 20 nt, Homo sapiens
  source 1..20: mol_type = other RNA
ggccagtacacctgtcacaa

SEQ ID NO: 3954 - RNA, 20 nt, Homo sapiens
  source 1..20: mol_type = other RNA
cagtacacctgtcacaaagg

SEQ ID NO: 3955 - RNA, 20 nt, Homo sapiens
  source 1..20: mol_type = other RNA
taagacctttctaagatgcg

SEQ ID NO: 3956 - RNA, 20 nt, Homo sapiens
  source 1..20: mol_type = other RNA
tgaggaccaccatttctcca

SEQ ID NO: 3957 - RNA, 20 nt, Homo sapiens
  source 1..20: mol_type = other RNA
ctccgcacgtcaccccttgg

SEQ ID NO: 3958 - RNA, 20 nt, Homo sapiens
  source 1..20: mol_type = other RNA
gcagactctcctcagcagct

SEQ ID NO: 3959 - RNA, 20 nt, Homo sapiens
  source 1..20: mol_type = other RNA
gagagtcagaggggacaaca

SEQ ID NO: 3960 - RNA, 20 nt, Homo sapiens
  source 1..20: mol_type = other RNA
gacccccaaggggtgacgtg

SEQ ID NO: 3961 - RNA, 20 nt, Homo sapiens
  source 1..20: mol_type = other RNA
gaccttggaccagagcagtg

SEQ ID NO: 3962 - RNA, 20 nt, Homo sapiens
  source 1..20: mol_type = other RNA
cagttcccatatggccacga

SEQ ID NO: 3963 - RNA, 20 nt, Homo sapiens
  source 1..20: mol_type = other RNA
gagtctgcccattgaggtca

SEQ ID NO: 3964 - RNA, 20 nt, Homo sapiens
  source 1..20: mol_type = other RNA
cacctgtcacaaaggaggcg

SEQ ID NO: 3965 - RNA, 20 nt, Homo sapiens
  source 1..20: mol_type = other RNA
ctgaagaagatggtatcacc

SEQ ID NO: 3966 - RNA, 20 nt, Homo sapiens
  source 1..20: mol_type = other RNA
tgagtactcagtggagtgcc

SEQ ID NO: 3967 - RNA, 20 nt, Homo sapiens
  source 1..20: mol_type = other RNA
agatggtatcacctggacct

SEQ ID NO: 3968 - RNA, 20 nt, Homo sapiens
  source 1..20: mol_type = other RNA
gcatccaccatgacctcaat

SEQ ID NO: 3969 - RNA, 20 nt, Homo sapiens
  source 1..20: mol_type = other RNA
gaggaccaccatttctccag

SEQ ID NO: 3970 - RNA, 20 nt, Homo sapiens
  source 1..20: mol_type = other RNA
tcagtgtcaaaagcagcaga

SEQ ID NO: 3971 - RNA, 20 nt, Homo sapiens
  source 1..20: mol_type = other RNA
gctccgcacgtcaccccttg

SEQ ID NO: 3972 - RNA, 20 nt, Homo sapiens
  source 1..20: mol_type = other RNA
acaaaaaggaagatggaatt

SEQ ID NO: 3973 - RNA, 20 nt, Homo sapiens
  source 1..20: mol_type = other RNA
ttaattccaaccaaatcccg

SEQ ID NO: 3974 - RNA, 20 nt, Homo sapiens
  source 1..20: mol_type = other RNA
tctaggccgatacaaagcag

SEQ ID NO: 3975 - RNA, 20 nt, Homo sapiens
  source 1..20: mol_type = other RNA
ctctaggccgatacaaagca

SEQ ID NO: 3976 - RNA, 20 nt, Homo sapiens
  source 1..20: mol_type = other RNA
aggagccagatcccaagacg

SEQ ID NO: 3977 - RNA, 20 nt, Homo sapiens
  source 1..20: mol_type = other RNA
gaactccctgccagatatcg

SEQ ID NO: 3978 - RNA, 20 nt, Homo sapiens
  source 1..20: mol_type = other RNA
cggagctgggccattcacac

SEQ ID NO: 3979 - RNA, 20 nt, Homo sapiens
  source 1..20: mol_type = other RNA
cacagttccaggctacatgc

SEQ ID NO: 3980 - RNA, 20 nt, Homo sapiens
  source 1..20: mol_type = other RNA
ccactgggatgtgccagtcg

SEQ ID NO: 3981 - RNA, 20 nt, Homo sapiens
  source 1..20: mol_type = other RNA
gccagatcccaagacgtgga

SEQ ID NO: 3982 - RNA, 20 nt, Homo sapiens
  source 1..20: mol_type = other RNA
ctggaagttgtacagatcac

SEQ ID NO: 3983 - RNA, 20 nt, Homo sapiens
  source 1..20: mol_type = other RNA
gttcatggcacagcgaaagt

SEQ ID NO: 3984 - RNA, 20 nt, Homo sapiens
  source 1..20: mol_type = other RNA
gctcagctgtgcgagtgtac

SEQ ID NO: 3985 - RNA, 20 nt, Homo sapiens
  source 1..20: mol_type = other RNA
ctgtgtgaatggcccagctc

SEQ ID NO: 3986 - RNA, 20 nt, Homo sapiens
  source 1..20: mol_type = other RNA
ctccctgccagatatcgagg

SEQ ID NO: 3987 - RNA, 20 nt, Homo sapiens
  source 1..20: mol_type = other RNA
cctctaggccgatacaaagc

SEQ ID NO: 3988 - RNA, 20 nt, Homo sapiens
  source 1..20: mol_type = other RNA
gctgctgagtccatcagaga

SEQ ID NO: 3989 - RNA, 20 nt, Homo sapiens
  source 1..20: mol_type = other RNA
cttgctcttagcatctcggc

SEQ ID NO: 3990 - RNA, 20 nt, Homo sapiens
  source 1..20: mol_type = other RNA
caggcacacacctgtgtgaa

SEQ ID NO: 3991 - RNA, 20 nt, Homo sapiens
  source 1..20: mol_type = other RNA
gcatggctgggacatcaaca

SEQ ID NO: 3992 - RNA, 20 nt, Homo sapiens
  source 1..20: mol_type = other RNA
ccccgactggcacatcccag

SEQ ID NO: 3993 - RNA, 20 nt, Homo sapiens
  source 1..20: mol_type = other RNA
tacagatcactggtgctgtc

SEQ ID NO: 3994 - RNA, 20 nt, Homo sapiens
  source 1..20: mol_type = other RNA
tcagcagcactctccccgac

SEQ ID NO: 3995 - RNA, 20 nt, Homo sapiens
  source 1..20: mol_type = other RNA
tgtccggcacaacttccact

SEQ ID NO: 3996 - RNA, 20 nt, Homo sapiens
  source 1..20: mol_type = other RNA
gctgtggtcatcaggcagag

SEQ ID NO: 3997 - RNA, 20 nt, Homo sapiens
  source 1..20: mol_type = other RNA
cagtgatctgtacaacttcc

SEQ ID NO: 3998 - RNA, 20 nt, Homo sapiens
  source 1..20: mol_type = other RNA
acctctccggacaccaatgg

SEQ ID NO: 3999 - RNA, 20 nt, Homo sapiens
  source 1..20: mol_type = other RNA
ggggagtgatgagctacgtg

SEQ ID NO: 4000 - RNA, 20 nt, Homo sapiens
  source 1..20: mol_type = other RNA
gaggtgacagccttctaccg

SEQ ID NO: 4001 - RNA, 20 nt, Homo sapiens
  source 1..20: mol_type = other RNA
gttactgggtaacatggtgt

SEQ ID NO: 4002 - RNA, 20 nt, Homo sapiens
  source 1..20: mol_type = other RNA
gacacctctccggacaccaa

SEQ ID NO: 4003 - RNA, 20 nt, Homo sapiens
  source 1..20: mol_type = other RNA
ccactggtgcatatgttccc

SEQ ID NO: 4004 - RNA, 20 nt, Homo sapiens
  source 1..20: mol_type = other RNA
cccgggaacatatgcaccag

SEQ ID NO: 4005 - RNA, 20 nt, Homo sapiens
  source 1..20: mol_type = other RNA
aggcagtacttctgataccc

SEQ ID NO: 4006 - RNA, 20 nt, Homo sapiens
  source 1..20: mol_type = other RNA
agaagggttgcgtttagcag

SEQ ID NO: 4007 - RNA, 20 nt, Homo sapiens
  source 1..20: mol_type = other RNA
ggatgagttactgggtaaca

SEQ ID NO: 4008 - RNA, 20 nt, Homo sapiens
  source 1..20: mol_type = other RNA
ctggtgcatatgttcccggg

SEQ ID NO: 4009 - RNA, 20 nt, Homo sapiens
  source 1..20: mol_type = other RNA
gagtgggattgtccaagctg

SEQ ID NO: 4010 - RNA, 20 nt, Homo sapiens
  source 1..20: mol_type = other RNA
ccactcccttcccaaacctg

SEQ ID NO: 4011 - RNA, 20 nt, Homo sapiens
  source 1..20: mol_type = other RNA
tggtgcatatgttcccggga

SEQ ID NO: 4012 - RNA, 20 nt, Homo sapiens
  source 1..20: mol_type = other RNA
gaacccactgaagcggctgt

SEQ ID NO: 4013 - RNA, 20 nt, Homo sapiens
  source 1..20: mol_type = other RNA
atctacgagtttgtgaactc

SEQ ID NO: 4014 - RNA, 20 nt, Homo sapiens
  source 1..20: mol_type = other RNA
tcccttggaagcacggccta

SEQ ID NO: 4015 - RNA, 20 nt, Homo sapiens
  source 1..20: mol_type = other RNA
gacattctggatgagttact

SEQ ID NO: 4016 - RNA, 20 nt, Homo sapiens
  source 1..20: mol_type = other RNA
ggttgcgtttagcagaggac

SEQ ID NO: 4017 - RNA, 20 nt, Homo sapiens
  source 1..20: mol_type = other RNA
cagcgtcctgtctcccactt

SEQ ID NO: 4018 - RNA, 20 nt, Homo sapiens
  source 1..20: mol_type = other RNA
ggcaccaacagccgcttcag

SEQ ID NO: 4019 - RNA, 20 nt, Homo sapiens
  source 1..20: mol_type = other RNA
cctctgagaacccactgaag

SEQ ID NO: 4020 - RNA, 20 nt, Homo sapiens
  source 1..20: mol_type = other RNA
gcaccaacagccgcttcagt

SEQ ID NO: 4021 - RNA, 20 nt, Homo sapiens
  source 1..20: mol_type = other RNA
ggcatgtccctgacagacag

SEQ ID NO: 4022 - RNA, 20 nt, Homo sapiens
  source 1..20: mol_type = other RNA
gggtcccggatctgggagtg

SEQ ID NO: 4023 - RNA, 20 nt, Homo sapiens
  source 1..20: mol_type = other RNA
gatgcactcaccttgcaccg

SEQ ID NO: 4024 - RNA, 20 nt, Homo sapiens
  source 1..20: mol_type = other RNA
gatgctgcgggataactcgg

SEQ ID NO: 4025 - RNA, 20 nt, Homo sapiens
  source 1..20: mol_type = other RNA
ggcagatccagtcccaacca

SEQ ID NO: 4026 - RNA, 20 nt, Homo sapiens
  source 1..20: mol_type = other RNA
tgatgctgcgggataactcg

SEQ ID NO: 4027 - RNA, 20 nt, Homo sapiens
  source 1..20: mol_type = other RNA
tctgctgacagcgtcatggg

SEQ ID NO: 4028 - RNA, 20 nt, Homo sapiens
  source 1..20: mol_type = other RNA
ttgcgcgcgaagtgcttcca

SEQ ID NO: 4029 - RNA, 20 nt, Homo sapiens
  source 1..20: mol_type = other RNA
ctgagcgcgtacaccttgtg

SEQ ID NO: 4030 - RNA, 20 nt, Homo sapiens
  source 1..20: mol_type = other RNA
gacgtgaccatcatgtacaa

SEQ ID NO: 4031 - RNA, 20 nt, Homo sapiens
  source 1..20: mol_type = other RNA
gggcacgcggaaacaggtgc

SEQ ID NO: 4032 - RNA, 20 nt, Homo sapiens
  source 1..20: mol_type = other RNA
caccttgaagatgcgcgcgt

SEQ ID NO: 4033 - RNA, 20 nt, Homo sapiens
  source 1..20: mol_type = other RNA
ctccccaagcgcctgcaccg

SEQ ID NO: 4034 - RNA, 20 nt, Homo sapiens
  source 1..20: mol_type = other RNA
agaagggcttcccctgactg

SEQ ID NO: 4035 - RNA, 20 nt, Homo sapiens
  source 1..20: mol_type = other RNA
agggcacgcggaaacaggtg

SEQ ID NO: 4036 - RNA, 20 nt, Homo sapiens
  source 1..20: mol_type = other RNA
cccaggcacggaccagactg

SEQ ID NO: 4037 - RNA, 20 nt, Homo sapiens
  source 1..20: mol_type = other RNA
tgagcgcgtacaccttgtgc

SEQ ID NO: 4038 - RNA, 20 nt, Homo sapiens
  source 1..20: mol_type = other RNA
ggacccggccgacccgcaca

SEQ ID NO: 4039 - RNA, 20 nt, Homo sapiens
  source 1..20: mol_type = other RNA
cgtgcggcccttgtacatga

SEQ ID NO: 4040 - RNA, 20 nt, Homo sapiens
  source 1..20: mol_type = other RNA
accatctgctgacagcgtca

SEQ ID NO: 4041 - RNA, 20 nt, Homo sapiens
  source 1..20: mol_type = other RNA
gcgtgctgcgcagtgcgcag

SEQ ID NO: 4042 - RNA, 20 nt, Homo sapiens
  source 1..20: mol_type = other RNA
cgacgcgcgcatcttcaagg

SEQ ID NO: 4043 - RNA, 20 nt, Homo sapiens
  source 1..20: mol_type = other RNA
tcagcagcggctgctatgag

SEQ ID NO: 4044 - RNA, 20 nt, Homo sapiens
  source 1..20: mol_type = other RNA
tccgcagtctcagcctcggg

SEQ ID NO: 4045 - RNA, 20 nt, Homo sapiens
  source 1..20: mol_type = other RNA
ccgtataggaacgtgcagct

SEQ ID NO: 4046 - RNA, 20 nt, Homo sapiens
  source 1..20: mol_type = other RNA
ctgccccagctggtgacaag

SEQ ID NO: 4047 - RNA, 20 nt, Homo sapiens
  source 1..20: mol_type = other RNA
tctggtccgggagctcggca

SEQ ID NO: 4048 - RNA, 20 nt, Homo sapiens
  source 1..20: mol_type = other RNA
gttccggaaccaatgcacag

SEQ ID NO: 4049 - RNA, 20 nt, Homo sapiens
  source 1..20: mol_type = other RNA
gtgcattggttccggaaccg

SEQ ID NO: 4050 - RNA, 20 nt, Homo sapiens
  source 1..20: mol_type = other RNA
gggagttacccagaacagtg

SEQ ID NO: 4051 - RNA, 20 nt, Homo sapiens
  source 1..20: mol_type = other RNA
cgtcccgccccacatactcg

SEQ ID NO: 4052 - RNA, 20 nt, Homo sapiens
  source 1..20: mol_type = other RNA
gctcacatcctctagtcgaa

SEQ ID NO: 4053 - RNA, 20 nt, Homo sapiens
  source 1..20: mol_type = other RNA
gttcaaaatgacccagtcgg

SEQ ID NO: 4054 - RNA, 20 nt, Homo sapiens
  source 1..20: mol_type = other RNA
ttccgctaagtggtgatggg

SEQ ID NO: 4055 - RNA, 20 nt, Homo sapiens
  source 1..20: mol_type = other RNA
gcagttcaaaatgacccagt

SEQ ID NO: 4056 - RNA, 20 nt, Homo sapiens
  source 1..20: mol_type = other RNA
agaggaagctttccgctaag

SEQ ID NO: 4057 - RNA, 20 nt, Homo sapiens
  source 1..20: mol_type = other RNA
gacgttgaagccatctctgt

SEQ ID NO: 4058 - RNA, 20 nt, Homo sapiens
  source 1..20: mol_type = other RNA
cgactttacccttcgactag

SEQ ID NO: 4059 - RNA, 20 nt, Homo sapiens
  source 1..20: mol_type = other RNA
gcggtccctgaggtgcaccg

SEQ ID NO: 4060 - RNA, 20 nt, Homo sapiens
  source 1..20: mol_type = other RNA
ctcagcaccgtgtagcggcg

SEQ ID NO: 4061 - RNA, 20 nt, Homo sapiens
  source 1..20: mol_type = other RNA
gaggagtccacttggcagtg

SEQ ID NO: 4062 - RNA, 20 nt, Homo sapiens
  source 1..20: mol_type = other RNA
ttcctgcagatggatatggc

SEQ ID NO: 4063 - RNA, 20 nt, Homo sapiens
  source 1..20: mol_type = other RNA
tcagccttctgcgaagagca

SEQ ID NO: 4064 - RNA, 20 nt, Homo sapiens
  source 1..20: mol_type = other RNA
actcccttgacagtgtacgc

SEQ ID NO: 4065 - RNA, 20 nt, Homo sapiens
  source 1..20: mol_type = other RNA
ggaaccaatgcacagaggct

SEQ ID NO: 4066 - RNA, 20 nt, Homo sapiens
  source 1..20: mol_type = other RNA
ggtctttcctcactgccaag

SEQ ID NO: 4067 - RNA, 20 nt, Homo sapiens
  source 1..20: mol_type = other RNA
acttggcagtgaggaaagac

SEQ ID NO: 4068 - RNA, 20 nt, Homo sapiens
  source 1..20: mol_type = other RNA
ggctcacatcctctagtcga

SEQ ID NO: 4069 - RNA, 20 nt, Homo sapiens
  source 1..20: mol_type = other RNA
gctccagcgtacactgtcaa

SEQ ID NO: 4070 - RNA, 20 nt, Homo sapiens
  source 1..20: mol_type = other RNA
agcgcggggacttctcgcta

SEQ ID NO: 4071 - RNA, 20 nt, Homo sapiens
  source 1..20: mol_type = other RNA
gagtccatggggctgacttg

SEQ ID NO: 4072 - RNA, 20 nt, Homo sapiens
  source 1..20: mol_type = other RNA
ccctcctgggcccacaccac

SEQ ID NO: 4073 - RNA, 20 nt, Homo sapiens
  source 1..20: mol_type = other RNA
aagctgttcatgtcaccaca

SEQ ID NO: 4074 - RNA, 20 nt, Homo sapiens
  source 1..20: mol_type = other RNA
tatgacttctatcccaacgg

SEQ ID NO: 4075 - RNA, 20 nt, Homo sapiens
  source 1..20: mol_type = other RNA
aaggtgcaccgatcgctcgt

SEQ ID NO: 4076 - RNA, 20 nt, Homo sapiens
  source 1..20: mol_type = other RNA
tggtgatgataatccacggg

SEQ ID NO: 4077 - RNA, 20 nt, Homo sapiens
  source 1..20: mol_type = other RNA
ctggagaaagacgattgctg

SEQ ID NO: 4078 - RNA, 20 nt, Homo sapiens
  source 1..20: mol_type = other RNA
catttcctaccgaccacccg

SEQ ID NO: 4079 - RNA, 20 nt, Homo sapiens
  source 1..20: mol_type = other RNA
gatgataatccacgggtggt

SEQ ID NO: 4080 - RNA, 20 nt, Homo sapiens
  source 1..20: mol_type = other RNA
tccctcaaacaaaggtcccg

SEQ ID NO: 4081 - RNA, 20 nt, Homo sapiens
  source 1..20: mol_type = other RNA
ataatccacgggtggtcggt

SEQ ID NO: 4082 - RNA, 20 nt, Homo sapiens
  source 1..20: mol_type = other RNA
ccgtggattatcatcaccag

SEQ ID NO: 4083 - RNA, 20 nt, Homo sapiens
  source 1..20: mol_type = other RNA
gtgggcatcaaacagcccat

SEQ ID NO: 4084 - RNA, 20 nt, Homo sapiens
  source 1..20: mol_type = other RNA
cttggacaaagcctgaaacc

SEQ ID NO: 4085 - RNA, 20 nt, Homo sapiens
  source 1..20: mol_type = other RNA
agctgttcatgtcaccacac

SEQ ID NO: 4086 - RNA, 20 nt, Homo sapiens
  source 1..20: mol_type = other RNA
gttcatgtcaccacacgggt

SEQ ID NO: 4087 - RNA, 20 nt, Homo sapiens
  source 1..20: mol_type = other RNA
tggagaaagacgattgctgg

SEQ ID NO: 4088 - RNA, 20 nt, Homo sapiens
  source 1..20: mol_type = other RNA
ccggcccagccagtgaacgt

SEQ ID NO: 4089 - RNA, 20 nt, Homo sapiens
  source 1..20: mol_type = other RNA
atcctgacacgtgtgcaccc

SEQ ID NO: 4090 - RNA, 20 nt, Homo sapiens
  source 1..20: mol_type = other RNA
ctatgacttctatcccaacg

SEQ ID NO: 4091 - RNA, 20 nt, Homo sapiens
  source 1..20: mol_type = other RNA
tgccattcatacctttaccc

SEQ ID NO: 4092 - RNA, 20 nt, Homo sapiens
  source 1..20: mol_type = other RNA
gacatgaacagcttcagcca

SEQ ID NO: 4093 - RNA, 20 nt, Homo sapiens
  source 1..20: mol_type = other RNA
aatcttgtgcgttccaccga

SEQ ID NO: 4094 - RNA, 20 nt, Homo sapiens
  source 1..20: mol_type = other RNA
aaaatgctcccacgagcgat

SEQ ID NO: 4095 - RNA, 20 nt, Homo sapiens
  source 1..20: mol_type = other RNA
ccgcactcctgtaacgtgtc

SEQ ID NO: 4096 - RNA, 20 nt, Homo sapiens
  source 1..20: mol_type = other RNA
ctctttggagaaaccaatca

SEQ ID NO: 4097 - RNA, 20 nt, Homo sapiens
  source 1..20: mol_type = other RNA
cacccgccttgtgggcaagg

SEQ ID NO: 4098 - RNA, 20 nt, Homo sapiens
  source 1..20: mol_type = other RNA
ttggactcgggaattcgtgg

SEQ ID NO: 4099 - RNA, 20 nt, Homo sapiens
  source 1..20: mol_type = other RNA
cttggacataacagcaacat

SEQ ID NO: 4100 - RNA, 20 nt, Homo sapiens
  source 1..20: mol_type = other RNA
tgagttccaaaatctgacat

SEQ ID NO: 4101 - RNA, 20 nt, Homo sapiens
  source 1..20: mol_type = other RNA
cgaattcccgagtccaacca

SEQ ID NO: 4102 - RNA, 20 nt, Homo sapiens
  source 1..20: mol_type = other RNA
agcgttctcaaacgatggag

SEQ ID NO: 4103 - RNA, 20 nt, Homo sapiens
  source 1..20: mol_type = other RNA
agtacctgaatcacttccca

SEQ ID NO: 4104 - RNA, 20 nt, Homo sapiens
  source 1..20: mol_type = other RNA
ggtgatgatgagtattgtga

SEQ ID NO: 4105 - RNA, 20 nt, Homo sapiens
  source 1..20: mol_type = other RNA
acaagttgatggtcctcaag

SEQ ID NO: 4106 - RNA, 20 nt, Homo sapiens
  source 1..20: mol_type = other RNA
tcatgagcgttctcaaacga

SEQ ID NO: 4107 - RNA, 20 nt, Homo sapiens
  source 1..20: mol_type = other RNA
cagtgtataataacatcatg

SEQ ID NO: 4108 - RNA, 20 nt, Homo sapiens
  source 1..20: mol_type = other RNA
aacttctagaaataatgaca

SEQ ID NO: 4109 - RNA, 20 nt, Homo sapiens
  source 1..20: mol_type = other RNA
tcagacacaagtttggcaga

SEQ ID NO: 4110 - RNA, 20 nt, Homo sapiens
  source 1..20: mol_type = other RNA
tcttggacataacagcaaca

SEQ ID NO: 4111 - RNA, 20 nt, Homo sapiens
  source 1..20: mol_type = other RNA
ttagtcccagtatctgagga

SEQ ID NO: 4112 - RNA, 20 nt, Homo sapiens
  source 1..20: mol_type = other RNA
ctcagggttcatgtagcggg

SEQ ID NO: 4113 - RNA, 20 nt, Homo sapiens
  source 1..20: mol_type = other RNA
tatcgtgttattggattaag

SEQ ID NO: 4114 - RNA, 20 nt, Homo sapiens
  source 1..20: mol_type = other RNA
gctgttagtcccagtatctg

SEQ ID NO: 4115 - RNA, 20 nt, Homo sapiens
  source 1..20: mol_type = other RNA
gatgctggtgttcaattgtc

SEQ ID NO: 4116 - RNA, 20 nt, Homo sapiens
  source 1..20: mol_type = other RNA
aatcagagcctgttaactct

SEQ ID NO: 4117 - RNA, 20 nt, Homo sapiens
  source 1..20: mol_type = other RNA
gagctcagggttcatgtagc

SEQ ID NO: 4118 - RNA, 20 nt, Homo sapiens
  source 1..20: mol_type = other RNA
tcaactgaaaaaccaaatac

SEQ ID NO: 4119 - RNA, 20 nt, Homo sapiens
  source 1..20: mol_type = other RNA
gcgttctcaaacgatggaga

SEQ ID NO: 4120 - RNA, 20 nt, Homo sapiens
  source 1..20: mol_type = other RNA
attgaagacagaaaccgggt

SEQ ID NO: 4121 - RNA, 20 nt, Homo sapiens
  source 1..20: mol_type = other RNA
ggcaatgtaaacagccactc

SEQ ID NO: 4122 - RNA, 20 nt, Homo sapiens
  source 1..20: mol_type = other RNA
catcaagattggcacatagc

SEQ ID NO: 4123 - RNA, 20 nt, Homo sapiens
  source 1..20: mol_type = other RNA
gcctacaggagtatgatgca

SEQ ID NO: 4124 - RNA, 20 nt, Homo sapiens
  source 1..20: mol_type = other RNA
aatgtgaccgatttcaccag

SEQ ID NO: 4125 - RNA, 20 nt, Homo sapiens
  source 1..20: mol_type = other RNA
tggattacaaagctgacgag

SEQ ID NO: 4126 - RNA, 20 nt, Homo sapiens
  source 1..20: mol_type = other RNA
gagtcaggatctcatatctg

SEQ ID NO: 4127 - RNA, 20 nt, Homo sapiens
  source 1..20: mol_type = other RNA
acaggagtatgatgcaaggt

SEQ ID NO: 4128 - RNA, 20 nt, Homo sapiens
  source 1..20: mol_type = other RNA
ctgcaggtcaagttcaacga

SEQ ID NO: 4129 - RNA, 20 nt, Homo sapiens
  source 1..20: mol_type = other RNA
gctgcaggtcaagttcaacg

SEQ ID NO: 4130 - RNA, 20 nt, Homo sapiens
  source 1..20: mol_type = other RNA
gggacgggattacgtccaga

SEQ ID NO: 4131 - RNA, 20 nt, Homo sapiens
  source 1..20: mol_type = other RNA
gaagcagaaacgggaccttg

SEQ ID NO: 4132 - RNA, 20 nt, Homo sapiens
  source 1..20: mol_type = other RNA
agagatctgccatgacctag

SEQ ID NO: 4133 - RNA, 20 nt, Homo sapiens
  source 1..20: mol_type = other RNA
caagctcaagaacaagcatg

SEQ ID NO: 4134 - RNA, 20 nt, Homo sapiens
  source 1..20: mol_type = other RNA
actccaaactccattcccaa

SEQ ID NO: 4135 - RNA, 20 nt, Homo sapiens
  source 1..20: mol_type = other RNA
ctgagtagtaacgctccttg

SEQ ID NO: 4136 - RNA, 20 nt, Homo sapiens
  source 1..20: mol_type = other RNA
catccagtatctggcgtacg

SEQ ID NO: 4137 - RNA, 20 nt, Homo sapiens
  source 1..20: mol_type = other RNA
tacaggagtatgatgcaagg

SEQ ID NO: 4138 - RNA, 20 nt, Homo sapiens
  source 1..20: mol_type = other RNA
gaagggcatgttccgcactg

SEQ ID NO: 4139 - RNA, 20 nt, Homo sapiens
  source 1..20: mol_type = other RNA
gcgtccatgcccgacaacac

SEQ ID NO: 4140 - RNA, 20 nt, Homo sapiens
  source 1..20: mol_type = other RNA
ctccgagacaaacttgtcag

SEQ ID NO: 4141 - RNA, 20 nt, Homo sapiens
  source 1..20: mol_type = other RNA
ccgctggaggaccttcatgg

SEQ ID NO: 4142 - RNA, 20 nt, Homo sapiens
  source 1..20: mol_type = other RNA
cacacagagcatttgccaag

SEQ ID NO: 4143 - RNA, 20 nt, Homo sapiens
  source 1..20: mol_type = other RNA
ccatcacagacaccgcctac

SEQ ID NO: 4144 - RNA, 20 nt, Homo sapiens
  source 1..20: mol_type = other RNA
tgtgatggcatagatgtgag

SEQ ID NO: 4145 - RNA, 20 nt, Homo sapiens
  source 1..20: mol_type = other RNA
atggacacgtcaccatcccc

SEQ ID NO: 4146 - RNA, 20 nt, Homo sapiens
  source 1..20: mol_type = other RNA
cttctattatctcctgtctg

SEQ ID NO: 4147 - RNA, 20 nt, Homo sapiens
  source 1..20: mol_type = other RNA
gcgctgcctacctgaagctg

SEQ ID NO: 4148 - RNA, 20 nt, Homo sapiens
  source 1..20: mol_type = other RNA
aggaaacaacagctaaccgg

SEQ ID NO: 4149 - RNA, 20 nt, Homo sapiens
  source 1..20: mol_type = other RNA
ttggcaattggtaacaccag

SEQ ID NO: 4150 - RNA, 20 nt, Homo sapiens
  source 1..20: mol_type = other RNA
actggacaaatcattaagtg

SEQ ID NO: 4151 - RNA, 20 nt, Homo sapiens
  source 1..20: mol_type = other RNA
acacctcgtgaactgtaatg

SEQ ID NO: 4152 - RNA, 20 nt, Homo sapiens
  source 1..20: mol_type = other RNA
ctagcagcaatattgcacct

SEQ ID NO: 4153 - RNA, 20 nt, Homo sapiens
  source 1..20: mol_type = other RNA
ggaggcattagcttgacctg

SEQ ID NO: 4154 - RNA, 20 nt, Homo sapiens
  source 1..20: mol_type = other RNA
ccttcctgcgtagtgcatga

SEQ ID NO: 4155 - RNA, 20 nt, Homo sapiens
  source 1..20: mol_type = other RNA
ggccatatttggctgccaag

SEQ ID NO: 4156 - RNA, 20 nt, Homo sapiens
  source 1..20: mol_type = other RNA
ggttcttaccagatggagca

SEQ ID NO: 4157 - RNA, 20 nt, Homo sapiens
  source 1..20: mol_type = other RNA
gtaggcacaaatcattgagt

SEQ ID NO: 4158 - RNA, 20 nt, Homo sapiens
  source 1..20: mol_type = other RNA
gtatttgaaccagaccatac

SEQ ID NO: 4159 - RNA, 20 nt, Homo sapiens
  source 1..20: mol_type = other RNA
ggaaggataggcagatacga

SEQ ID NO: 4160 - RNA, 20 nt, Homo sapiens
  source 1..20: mol_type = other RNA
ttaataatttatgtgcacac

SEQ ID NO: 4161 - RNA, 20 nt, Homo sapiens
  source 1..20: mol_type = other RNA
gtgtgcgagtggctacaagg

SEQ ID NO: 4162 - RNA, 20 nt, Homo sapiens
  source 1..20: mol_type = other RNA
caccatagcatcacaactca

SEQ ID NO: 4163 - RNA, 20 nt, Homo sapiens
  source 1..20: mol_type = other RNA
gctaaacaaacgactgtaca

SEQ ID NO: 4164 - RNA, 20 nt, Homo sapiens
  source 1..20: mol_type = other RNA
aggaggcattagcttgacct

SEQ ID NO: 4165 - RNA, 20 nt, Homo sapiens
  source 1..20: mol_type = other RNA
gcagggcagacttatgtcct

SEQ ID NO: 4166 - RNA, 20 nt, Homo sapiens
  source 1..20: mol_type = other RNA
ccatcatgcactacgcagga

SEQ ID NO: 4167 - RNA, 20 nt, Homo sapiens
  source 1..20: mol_type = other RNA
gacaatatcagggttatcgc

SEQ ID NO: 4168 - RNA, 20 nt, Homo sapiens
  source 1..20: mol_type = other RNA
acaggatgatgcatccacag

SEQ ID NO: 4169 - RNA, 20 nt, Homo sapiens
  source 1..20: mol_type = other RNA
tcggtttactgccctgaatg

SEQ ID NO: 4170 - RNA, 20 nt, Homo sapiens
  source 1..20: mol_type = other RNA
ttcaccatcatgcactacgc

SEQ ID NO: 4171 - RNA, 20 nt, Homo sapiens
  source 1..20: mol_type = other RNA
tttgcttgttaacccataca

SEQ ID NO: 4172 - RNA, 20 nt, Homo sapiens
  source 1..20: mol_type = other RNA
acagtcaagatgaacagaaa

SEQ ID NO: 4173 - RNA, 20 nt, Homo sapiens
  source 1..20: mol_type = other RNA
cagactaaggacccgcccag

SEQ ID NO: 4174 - RNA, 20 nt, Homo sapiens
  source 1..20: mol_type = other RNA
tgtgcttggccaaagcatcg

SEQ ID NO: 4175 - RNA, 20 nt, Homo sapiens
  source 1..20: mol_type = other RNA
aaatggaagacattccatca

SEQ ID NO: 4176 - RNA, 20 nt, Homo sapiens
  source 1..20: mol_type = other RNA
accatgcagagatacgtgcg

SEQ ID NO: 4177 - RNA, 20 nt, Homo sapiens
  source 1..20: mol_type = other RNA
ggaaaccatccgaatcagtg

SEQ ID NO: 4178 - RNA, 20 nt, Homo sapiens
  source 1..20: mol_type = other RNA
tttaattacacaaaacaagg

SEQ ID NO: 4179 - RNA, 20 nt, Homo sapiens
  source 1..20: mol_type = other RNA
aaagctttgtttgatagacg

SEQ ID NO: 4180 - RNA, 20 nt, Homo sapiens
  source 1..20: mol_type = other RNA
tccagaagaccatccgaggg

SEQ ID NO: 4181 - RNA, 20 nt, Homo sapiens
  source 1..20: mol_type = other RNA
gaaagaagtacctacgcatg

SEQ ID NO: 4182 - RNA, 20 nt, Homo sapiens
  source 1..20: mol_type = other RNA
actggaatatgagtcactca

SEQ ID NO: 4183 - RNA, 20 nt, Homo sapiens
  source 1..20: mol_type = other RNA
gataggccacttgaccggca

SEQ ID NO: 4184 - RNA, 20 nt, Homo sapiens
  source 1..20: mol_type = other RNA
gatacagcgcacatagtgag

SEQ ID NO: 4185 - RNA, 20 nt, Homo sapiens
  source 1..20: mol_type = other RNA
gtaagactgaagaacgatag

SEQ ID NO: 4186 - RNA, 20 nt, Homo sapiens
  source 1..20: mol_type = other RNA
aggaacaatgacatgtccag

SEQ ID NO: 4187 - RNA, 20 nt, Homo sapiens
  source 1..20: mol_type = other RNA
caaaatcgaggctcgctcag

SEQ ID NO: 4188 - RNA, 20 nt, Homo sapiens
  source 1..20: mol_type = other RNA
gattctataagattaataca

SEQ ID NO: 4189 - RNA, 20 nt, Homo sapiens
  source 1..20: mol_type = other RNA
tagctactaggactatacct

SEQ ID NO: 4190 - RNA, 20 nt, Homo sapiens
  source 1..20: mol_type = other RNA
atcattcagaagcgagtccg

SEQ ID NO: 4191 - RNA, 20 nt, Homo sapiens
  source 1..20: mol_type = other RNA
aagcgaaagttgccactggg

SEQ ID NO: 4192 - RNA, 20 nt, Homo sapiens
  source 1..20: mol_type = other RNA
cacagttgcaaagtatcgca

SEQ ID NO: 4193 - RNA, 20 nt, Homo sapiens
  source 1..20: mol_type = other RNA
gaagtacctacgcatgcgga

SEQ ID NO: 4194 - RNA, 20 nt, Homo sapiens
  source 1..20: mol_type = other RNA
atagctactaggactatacc

SEQ ID NO: 4195 - RNA, 20 nt, Homo sapiens
  source 1..20: mol_type = other RNA
gaaataggtatcgcaaggtg

SEQ ID NO: 4196 - RNA, 20 nt, Homo sapiens
  source 1..20: mol_type = other RNA
aggaagcgaaagttgccact

SEQ ID NO: 4197 - RNA, 20 nt, Homo sapiens
  source 1..20: mol_type = other RNA
aaagtactggcgcatgtatg

SEQ ID NO: 4198 - RNA, 20 nt, Homo sapiens
  source 1..20: mol_type = other RNA
cccagtgaagtaaaacccag

SEQ ID NO: 4199 - RNA, 20 nt, Homo sapiens
  source 1..20: mol_type = other RNA
gtacagctcatggataccac

SEQ ID NO: 4200 - RNA, 20 nt, Homo sapiens
  source 1..20: mol_type = other RNA
cagcctctgagagcacacaa

SEQ ID NO: 4201 - RNA, 20 nt, Homo sapiens
  source 1..20: mol_type = other RNA
atttcctaaacatccaccac

SEQ ID NO: 4202 - RNA, 20 nt, Homo sapiens
  source 1..20: mol_type = other RNA
atatataggtaaacaggaca

SEQ ID NO: 4203 - RNA, 20 nt, Homo sapiens
  source 1..20: mol_type = other RNA
agcctctgagagcacacaag

SEQ ID NO: 4204 - RNA, 20 nt, Homo sapiens
  source 1..20: mol_type = other RNA
aatctggatgaaacctcttg

SEQ ID NO: 4205 - RNA, 20 nt, Homo sapiens
  source 1..20: mol_type = other RNA
ggctgagaggaggtaaaatg

SEQ ID NO: 4206 - RNA, 20 nt, Homo sapiens
  source 1..20: mol_type = other RNA
tccccatagaagaccacaag

SEQ ID NO: 4207 - RNA, 20 nt, Homo sapiens
  source 1..20: mol_type = other RNA
atggataccacaggagatgg

SEQ ID NO: 4208 - RNA, 20 nt, Homo sapiens
  source 1..20: mol_type = other RNA
cttctatggggagtctcgtg

SEQ ID NO: 4209 - RNA, 20 nt, Homo sapiens
  source 1..20: mol_type = other RNA
agaaggagatgatccttgga

SEQ ID NO: 4210 - RNA, 20 nt, Homo sapiens
  source 1..20: mol_type = other RNA
gcacacaaggggatatccct

SEQ ID NO: 4211 - RNA, 20 nt, Homo sapiens
  source 1..20: mol_type = other RNA
ataaaatggccagttcctga

SEQ ID NO: 4212 - RNA, 20 nt, Homo sapiens
  source 1..20: mol_type = other RNA
atccccttgtgtgctctcag

SEQ ID NO: 4213 - RNA, 20 nt, Homo sapiens
  source 1..20: mol_type = other RNA
ctcatggataccacaggaga

SEQ ID NO: 4214 - RNA, 20 nt, Homo sapiens
  source 1..20: mol_type = other RNA
ctgttactgaaatgtgcgtg

SEQ ID NO: 4215 - RNA, 20 nt, Homo sapiens
  source 1..20: mol_type = other RNA
cttatgagccgtacagctca

SEQ ID NO: 4216 - RNA, 20 nt, Homo sapiens
  source 1..20: mol_type = other RNA
agttccaccagaccagacga

SEQ ID NO: 4217 - RNA, 20 nt, Homo sapiens
  source 1..20: mol_type = other RNA
gttccaccagaccagacgag

SEQ ID NO: 4218 - RNA, 20 nt, Homo sapiens
  source 1..20: mol_type = other RNA
agatatcaagcaaagacatg

SEQ ID NO: 4219 - RNA, 20 nt, Homo sapiens
  source 1..20: mol_type = other RNA
caaggccagctcaccacagg

SEQ ID NO: 4220 - RNA, 20 nt, Homo sapiens
  source 1..20: mol_type = other RNA
taggcgcttacagtcatcat

SEQ ID NO: 4221 - RNA, 20 nt, Homo sapiens
  source 1..20: mol_type = other RNA
accattgaaaagtaagcttg

SEQ ID NO: 4222 - RNA, 20 nt, Homo sapiens
  source 1..20: mol_type = other RNA
tatacagacagtattataaa

SEQ ID NO: 4223 - RNA, 20 nt, Homo sapiens
  source 1..20: mol_type = other RNA
tcggactttccatcgccaag

SEQ ID NO: 4224 - RNA, 20 nt, Homo sapiens
  source 1..20: mol_type = other RNA
ggatgtgtccagcgtgaatg

SEQ ID NO: 4225 - RNA, 20 nt, Homo sapiens
  source 1..20: mol_type = other RNA
agaagtcaaataagtaatcg

SEQ ID NO: 4226 - RNA, 20 nt, Homo sapiens
  source 1..20: mol_type = other RNA
gcagttcgaaatcaaacttg

SEQ ID NO: 4227 - RNA, 20 nt, Homo sapiens
  source 1..20: mol_type = other RNA
cgtgttgatacactgctgcg

SEQ ID NO: 4228 - RNA, 20 nt, Homo sapiens
  source 1..20: mol_type = other RNA
aaagcttatatatcaactca

SEQ ID NO: 4229 - RNA, 20 nt, Homo sapiens
  source 1..20: mol_type = other RNA
ccactaccactgagtgcctg

SEQ ID NO: 4230 - RNA, 20 nt, Homo sapiens
  source 1..20: mol_type = other RNA
tttgagctgtatatttacag

SEQ ID NO: 4231 - RNA, 20 nt, Homo sapiens
  source 1..20: mol_type = other RNA
catcacttgtgcaatccaga

SEQ ID NO: 4232 - RNA, 20 nt, Homo sapiens
  source 1..20: mol_type = other RNA
caggacatcctcattcacgc

SEQ ID NO: 4233 - RNA, 20 nt, Homo sapiens
  source 1..20: mol_type = other RNA
ccttcacagaacctgtcctg

SEQ ID NO: 4234 - RNA, 20 nt, Homo sapiens
  source 1..20: mol_type = other RNA
catccgagaagtgctgatca

SEQ ID NO: 4235 - RNA, 20 nt, Homo sapiens
  source 1..20: mol_type = other RNA
tctgtaaatatacagctcaa

SEQ ID NO: 4236 - RNA, 20 nt, Homo sapiens
  source 1..20: mol_type = other RNA
aggatgtcctgctgacaact

SEQ ID NO: 4237 - RNA, 20 nt, Homo sapiens
  source 1..20: mol_type = other RNA
attcggagcctggaccactg

SEQ ID NO: 4238 - RNA, 20 nt, Homo sapiens
  source 1..20: mol_type = other RNA
tggcgatggaaagtccgaga

SEQ ID NO: 4239 - RNA, 20 nt, Homo sapiens
  source 1..20: mol_type = other RNA
aatgtcaatatcttcaccaa

SEQ ID NO: 4240 - RNA, 20 nt, Homo sapiens
  source 1..20: mol_type = other RNA
ccactgtggagacctagctc

SEQ ID NO: 4241 - RNA, 20 nt, Homo sapiens
  source 1..20: mol_type = other RNA
taatgtcaatatcttcacca

SEQ ID NO: 4242 - RNA, 20 nt, Homo sapiens
  source 1..20: mol_type = other RNA
tatccaggagttgatcacag

SEQ ID NO: 4243 - RNA, 20 nt, Homo sapiens
  source 1..20: mol_type = other RNA
acccacaggtgtaccggagc

SEQ ID NO: 4244 - RNA, 20 nt, Homo sapiens
  source 1..20: mol_type = other RNA
caaactgccgtatgtgcctc

SEQ ID NO: 4245 - RNA, 20 nt, Homo sapiens
  source 1..20: mol_type = other RNA
ccttaagggatttaagaaag

SEQ ID NO: 4246 - RNA, 20 nt, Homo sapiens
  source 1..20: mol_type = other RNA
agaaacctacattcccagca

SEQ ID NO: 4247 - RNA, 20 nt, Homo sapiens
  source 1..20: mol_type = other RNA
ctgcaagtaaccattcccct

SEQ ID NO: 4248 - RNA, 20 nt, Homo sapiens
  source 1..20: mol_type = other RNA
ggtgcctttgacgagcacat

SEQ ID NO: 4249 - RNA, 20 nt, Homo sapiens
  source 1..20: mol_type = other RNA
aaaagagatgagccgaagtg

SEQ ID NO: 4250 - RNA, 20 nt, Homo sapiens
  source 1..20: mol_type = other RNA
gttctatatccactgtcgag

SEQ ID NO: 4251 - RNA, 20 nt, Homo sapiens
  source 1..20: mol_type = other RNA
ttctgccagtcagtgcagag

SEQ ID NO: 4252 - RNA, 20 nt, Homo sapiens
  source 1..20: mol_type = other RNA
caaggctcacctctcgacag

SEQ ID NO: 4253 - RNA, 20 nt, Homo sapiens
  source 1..20: mol_type = other RNA
agagattgatctcaatcttg

SEQ ID NO: 4254 - RNA, 20 nt, Homo sapiens
  source 1..20: mol_type = other RNA
gaagacaggaatgcccgtct

SEQ ID NO: 4255 - RNA, 20 nt, Homo sapiens
  source 1..20: mol_type = other RNA
ggggctgcagcaaactggaa

SEQ ID NO: 4256 - RNA, 20 nt, Homo sapiens
  source 1..20: mol_type = other RNA
gatcgcagcgaagatccaca

SEQ ID NO: 4257 - RNA, 20 nt, Homo sapiens
  source 1..20: mol_type = other RNA
aaggaaggacgaacgttcca

SEQ ID NO: 4258 - RNA, 20 nt, Homo sapiens
  source 1..20: mol_type = other RNA
aatgatcgacttcaatgggg

SEQ ID NO: 4259 - RNA, 20 nt, Homo sapiens
  source 1..20: mol_type = other RNA
gctcatcaccacgagacctg

SEQ ID NO: 4260 - RNA, 20 nt, Homo sapiens
  source 1..20: mol_type = other RNA
gaagacgtacaccgcggtgg

SEQ ID NO: 4261 - RNA, 20 nt, Homo sapiens
  source 1..20: mol_type = other RNA
attgaagtcgatcattagcg

SEQ ID NO: 4262 - RNA, 20 nt, Homo sapiens
  source 1..20: mol_type = other RNA
gttctcctgaatcagactga

SEQ ID NO: 4263 - RNA, 20 nt, Homo sapiens
  source 1..20: mol_type = other RNA
cacacgatccagcagaccag

SEQ ID NO: 4264 - RNA, 20 nt, Homo sapiens
  source 1..20: mol_type = other RNA
aggtgagccttgtgacacag

SEQ ID NO: 4265 - RNA, 20 nt, Homo sapiens
  source 1..20: mol_type = other RNA
cagtccatgattcctgaggt

SEQ ID NO: 4266 - RNA, 20 nt, Homo sapiens
  source 1..20: mol_type = other RNA
ctgtttgtacgagatgcagg

SEQ ID NO: 4267 - RNA, 20 nt, Homo sapiens
  source 1..20: mol_type = other RNA
cggggacactctaccaagac

SEQ ID NO: 4268 - RNA, 20 nt, Homo sapiens
  source 1..20: mol_type = other RNA
aatcttggggaaatagtcca

SEQ ID NO: 4269 - RNA, 20 nt, Homo sapiens
  source 1..20: mol_type = other RNA
actatggcaaattcgaaaag

SEQ ID NO: 4270 - RNA, 20 nt, Homo sapiens
  source 1..20: mol_type = other RNA
ccagaaggactgtcacgtct

SEQ ID NO: 4271 - RNA, 20 nt, Homo sapiens
  source 1..20: mol_type = other RNA
gaatcccactgtgatatgcc

SEQ ID NO: 4272 - RNA, 20 nt, Homo sapiens
  source 1..20: mol_type = other RNA
ggagatcctgggtttctccg

SEQ ID NO: 4273 - RNA, 20 nt, Homo sapiens
  source 1..20: mol_type = other RNA
caatccattcgctttcaccg

SEQ ID NO: 4274 - RNA, 20 nt, Homo sapiens
  source 1..20: mol_type = other RNA
ccaagtacccttattccaga

SEQ ID NO: 4275 - RNA, 20 nt, Homo sapiens
  source 1..20: mol_type = other RNA
aggttaacaggacacggtca

SEQ ID NO: 4276 - RNA, 20 nt, Homo sapiens
  source 1..20: mol_type = other RNA
cgatcttcacaccgtcccag

SEQ ID NO: 4277 - RNA, 20 nt, Homo sapiens
  source 1..20: mol_type = other RNA
accggccagccattgtcagg

SEQ ID NO: 4278 - RNA, 20 nt, Homo sapiens
  source 1..20: mol_type = other RNA
tggccaaaccactctctgtg

SEQ ID NO: 4279 - RNA, 20 nt, Homo sapiens
  source 1..20: mol_type = other RNA
caggtggcacaaaccgtgca

SEQ ID NO: 4280 - RNA, 20 nt, Homo sapiens
  source 1..20: mol_type = other RNA
ctggcctgccacaattgaag

SEQ ID NO: 4281 - RNA, 20 nt, Homo sapiens
  source 1..20: mol_type = other RNA
agccaagagaaatgtcatca

SEQ ID NO: 4282 - RNA, 20 nt, Homo sapiens
  source 1..20: mol_type = other RNA
ggcctgtcagaagctcatcg

SEQ ID NO: 4283 - RNA, 20 nt, Homo sapiens
  source 1..20: mol_type = other RNA
ctctcctgggaggactacga

SEQ ID NO: 4284 - RNA, 20 nt, Homo sapiens
  source 1..20: mol_type = other RNA
ttaacaggacacggtcaggg

SEQ ID NO: 4285 - RNA, 20 nt, Homo sapiens
  source 1..20: mol_type = other RNA
gacaccatccatgagaagac

SEQ ID NO: 4286 - RNA, 20 nt, Homo sapiens
  source 1..20: mol_type = other RNA
cctgaggaacgccgacacag

SEQ ID NO: 4287 - RNA, 20 nt, Homo sapiens
  source 1..20: mol_type = other RNA
gaagcccttgaggttgaact

SEQ ID NO: 4288 - RNA, 20 nt, Homo sapiens
  source 1..20: mol_type = other RNA
tcaggaattaccagtcccat

SEQ ID NO: 4289 - RNA, 20 nt, Homo sapiens
  source 1..20: mol_type = other RNA
actgagtgccaggtagaacg

SEQ ID NO: 4290 - RNA, 20 nt, Homo sapiens
  source 1..20: mol_type = other RNA
cagtgtccgcatcgtcattg

SEQ ID NO: 4291 - RNA, 20 nt, Homo sapiens
  source 1..20: mol_type = other RNA
catcaaaggttaacaggaca

SEQ ID NO: 4292 - RNA, 20 nt, Homo sapiens
  source 1..20: mol_type = other RNA
catatctgtagtggtctttg

SEQ ID NO: 4293 - RNA, 20 nt, Homo sapiens
  source 1..20: mol_type = other RNA
agtccgcacagagagtggtt

SEQ ID NO: 4294 - RNA, 20 nt, Homo sapiens
  source 1..20: mol_type = other RNA
cgcaccgagttcaacctcaa

SEQ ID NO: 4295 - RNA, 20 nt, Homo sapiens
  source 1..20: mol_type = other RNA
aggtgtctgagcaaagctgg

SEQ ID NO: 4296 - RNA, 20 nt, Homo sapiens
  source 1..20: mol_type = other RNA
ctgggacccagtcttcttcg

SEQ ID NO: 4297 - RNA, 20 nt, Homo sapiens
  source 1..20: mol_type = other RNA
acgccgacacagcggccgga

SEQ ID NO: 4298 - RNA, 20 nt, Homo sapiens
  source 1..20: mol_type = other RNA
ggagtgggtgacaaaaggga

SEQ ID NO: 4299 - RNA, 20 nt, Homo sapiens
  source 1..20: mol_type = other RNA
gtgaatggcacaacaggaga

SEQ ID NO: 4300 - RNA, 20 nt, Homo sapiens
  source 1..20: mol_type = other RNA
cttactctttacccctgtca

SEQ ID NO: 4301 - RNA, 20 nt, Homo sapiens
  source 1..20: mol_type = other RNA
gatcaggtgataattcacgt

SEQ ID NO: 4302 - RNA, 20 nt, Homo sapiens
  source 1..20: mol_type = other RNA
gtaataaaatggcagggcag

SEQ ID NO: 4303 - RNA, 20 nt, Homo sapiens
  source 1..20: mol_type = other RNA
agttacccattctcagtcat

SEQ ID NO: 4304 - RNA, 20 nt, Homo sapiens
  source 1..20: mol_type = other RNA
caccgttcttcctcaagcca

SEQ ID NO: 4305 - RNA, 20 nt, Homo sapiens
  source 1..20: mol_type = other RNA
actgaatttcagcccttgga

SEQ ID NO: 4306 - RNA, 20 nt, Homo sapiens
  source 1..20: mol_type = other RNA
attctcagtcattggcgtga

SEQ ID NO: 4307 - RNA, 20 nt, Homo sapiens
  source 1..20: mol_type = other RNA
ttcctcaagccatggaccaa

SEQ ID NO: 4308 - RNA, 20 nt, Homo sapiens
  source 1..20: mol_type = other RNA
ataagatccccaccttccaa

SEQ ID NO: 4309 - RNA, 20 nt, Homo sapiens
  source 1..20: mol_type = other RNA
ttcagtaattggtcagtatg

SEQ ID NO: 4310 - RNA, 20 nt, Homo sapiens
  source 1..20: mol_type = other RNA
ctctttacccctgtcaaggc

SEQ ID NO: 4311 - RNA, 20 nt, Homo sapiens
  source 1..20: mol_type = other RNA
tgaacagtgaatggcacaac

SEQ ID NO: 4312 - RNA, 20 nt, Homo sapiens
  source 1..20: mol_type = other RNA
tcacgccaatgactgagaat

SEQ ID NO: 4313 - RNA, 20 nt, Homo sapiens
  source 1..20: mol_type = other RNA
gtgctgaggagttgttggat

SEQ ID NO: 4314 - RNA, 20 nt, Homo sapiens
  source 1..20: mol_type = other RNA
actgagcttgaaggagtcac

SEQ ID NO: 4315 - RNA, 20 nt, Homo sapiens
  source 1..20: mol_type = other RNA
tcacccactcctctgcaacc

SEQ ID NO: 4316 - RNA, 20 nt, Homo sapiens
  source 1..20: mol_type = other RNA
ctctttgtttgaacagtgaa

SEQ ID NO: 4317 - RNA, 20 nt, Homo sapiens
  source 1..20: mol_type = other RNA
tacctttggtccatggcttg

SEQ ID NO: 4318 - RNA, 20 nt, Homo sapiens
  source 1..20: mol_type = other RNA
tcgccaggttgcagaggagt

SEQ ID NO: 4319 - RNA, 20 nt, Homo sapiens
  source 1..20: mol_type = other RNA
tcacattcctgccttgacag

SEQ ID NO: 4320 - RNA, 20 nt, Homo sapiens
  source 1..20: mol_type = other RNA
gatacagatctcttagactt

SEQ ID NO: 4321 - RNA, 20 nt, Homo sapiens
  source 1..20: mol_type = other RNA
agagcgtcgccaggttgcag

SEQ ID NO: 4322 - RNA, 20 nt, Homo sapiens
  source 1..20: mol_type = other RNA
ttacctcatccaccccaaaa

SEQ ID NO: 4323 - RNA, 20 nt, Homo sapiens
  source 1..20: mol_type = other RNA
gtacaacacctcgtcgccga

SEQ ID NO: 4324 - RNA, 20 nt, Homo sapiens
  source 1..20: mol_type = other RNA
tacatcttcgagatcgaggg

SEQ ID NO: 4325 - RNA, 20 nt, Homo sapiens
  source 1..20: mol_type = other RNA
tggcggggaacaccatcatg

SEQ ID NO: 4326 - RNA, 20 nt, Homo sapiens
  source 1..20: mol_type = other RNA
ctggagggagtgattccaca

SEQ ID NO: 4327 - RNA, 20 nt, Homo sapiens
  source 1..20: mol_type = other RNA
cctgagccacaaccagctgt

SEQ ID NO: 4328 - RNA, 20 nt, Homo sapiens
  source 1..20: mol_type = other RNA
gtcaggaaacgccctgacgg

SEQ ID NO: 4329 - RNA, 20 nt, Homo sapiens
  source 1..20: mol_type = other RNA
tcagctacaacgtcctggag

SEQ ID NO: 4330 - RNA, 20 nt, Homo sapiens
  source 1..20: mol_type = other RNA
tgttcctagcattggcgaag

SEQ ID NO: 4331 - RNA, 20 nt, Homo sapiens
  source 1..20: mol_type = other RNA
ctggacgactccgtcttcga

SEQ ID NO: 4332 - RNA, 20 nt, Homo sapiens
  source 1..20: mol_type = other RNA
gagatctgcgaggtcgctgg

SEQ ID NO: 4333 - RNA, 20 nt, Homo sapiens
  source 1..20: mol_type = other RNA
gtccgcaacttgctgtactg

SEQ ID NO: 4334 - RNA, 20 nt, Homo sapiens
  source 1..20: mol_type = other RNA
gagtggttcctcgcgaccgg

SEQ ID NO: 4335 - RNA, 20 nt, Homo sapiens
  source 1..20: mol_type = other RNA
cttgtcaggaaacgccctga

SEQ ID NO: 4336 - RNA, 20 nt, Homo sapiens
  source 1..20: mol_type = other RNA
gaactacatcttcgagatcg

SEQ ID NO: 4337 - RNA, 20 nt, Homo sapiens
  source 1..20: mol_type = other RNA
ggagtcgtccagccgcatga

SEQ ID NO: 4338 - RNA, 20 nt, Homo sapiens
  source 1..20: mol_type = other RNA
aactacatcttcgagatcga

SEQ ID NO: 4339 - RNA, 20 nt, Homo sapiens
  source 1..20: mol_type = other RNA
tggaggagaattcttcccag

SEQ ID NO: 4340 - RNA, 20 nt, Homo sapiens
  source 1..20: mol_type = other RNA
tgtacaacacctcgtcgccg

SEQ ID NO: 4341 - RNA, 20 nt, Homo sapiens
  source 1..20: mol_type = other RNA
tcgtggacttcgggctcacg

SEQ ID NO: 4342 - RNA, 20 nt, Homo sapiens
  source 1..20: mol_type = other RNA
ggagtggttcctcgcgaccg

SEQ ID NO: 4343 - RNA, 20 nt, Homo sapiens
  source 1..20: mol_type = other RNA
agcccgaagtccacgatgca

SEQ ID NO: 4344 - RNA, 20 nt, Homo sapiens
  source 1..20: mol_type = other RNA
acctgccagacggcttcctg

SEQ ID NO: 4345 - RNA, 20 nt, Homo sapiens
  source 1..20: mol_type = other RNA
tgtagtgatgttcctagcat

SEQ ID NO: 4346 - RNA, 20 nt, Homo sapiens
  source 1..20: mol_type = other RNA
tcagcggctccacccacctg

SEQ ID NO: 4347 - RNA, 20 nt, Homo sapiens
  source 1..20: mol_type = other RNA
cccccaggaccaggctgcgc

SEQ ID NO: 4348 - RNA, 20 nt, Homo sapiens
  source 1..20: mol_type = other RNA
agggcctttatacgccacca

SEQ ID NO: 4349 - RNA, 20 nt, Homo sapiens
  source 1..20: mol_type = other RNA
tatctaccgagcttccgtgg

SEQ ID NO: 4350 - RNA, 20 nt, Homo sapiens
  source 1..20: mol_type = other RNA
tgggcgaagtagctcatcag

SEQ ID NO: 4351 - RNA, 20 nt, Homo sapiens
  source 1..20: mol_type = other RNA
gggactttgtagtgacccgg

SEQ ID NO: 4352 - RNA, 20 nt, Homo sapiens
  source 1..20: mol_type = other RNA
ttctggactggtgttatggg

SEQ ID NO: 4353 - RNA, 20 nt, Homo sapiens
  source 1..20: mol_type = other RNA
gtggtgctgtatgggacagt

SEQ ID NO: 4354 - RNA, 20 nt, Homo sapiens
  source 1..20: mol_type = other RNA
cctgcgcctcaacttcagcg

SEQ ID NO: 4355 - RNA, 20 nt, Homo sapiens
  source 1..20: mol_type = other RNA
gctcatcaggggtactctcg

SEQ ID NO: 4356 - RNA, 20 nt, Homo sapiens
  source 1..20: mol_type = other RNA
accatgcgcccaaacactcg

SEQ ID NO: 4357 - RNA, 20 nt, Homo sapiens
  source 1..20: mol_type = other RNA
catggtgggtaaaagccggg

SEQ ID NO: 4358 - RNA, 20 nt, Homo sapiens
  source 1..20: mol_type = other RNA
gggtactctcgcggatcaca

SEQ ID NO: 4359 - RNA, 20 nt, Homo sapiens
  source 1..20: mol_type = other RNA
tatacgccaccacggaagct

SEQ ID NO: 4360 - RNA, 20 nt, Homo sapiens
  source 1..20: mol_type = other RNA
cgggttaaagagctgagaca

SEQ ID NO: 4361 - RNA, 20 nt, Homo sapiens
  source 1..20: mol_type = other RNA
cccactcagaagctatacag

SEQ ID NO: 4362 - RNA, 20 nt, Homo sapiens
  source 1..20: mol_type = other RNA
gggatacggccaatggcaga

SEQ ID NO: 4363 - RNA, 20 nt, Homo sapiens
  source 1..20: mol_type = other RNA
agagacacctgaaccgccaa

SEQ ID NO: 4364 - RNA, 20 nt, Homo sapiens
  source 1..20: mol_type = other RNA
ggcgggcacggtgaacacga

SEQ ID NO: 4365 - RNA, 20 nt, Homo sapiens
  source 1..20: mol_type = other RNA
ggcatgcaggaagtgcaagg

SEQ ID NO: 4366 - RNA, 20 nt, Homo sapiens
  source 1..20: mol_type = other RNA
gtgggcgaagtagctcatca

SEQ ID NO: 4367 - RNA, 20 nt, Homo sapiens
  source 1..20: mol_type = other RNA
agtccctttaccagttgcag

SEQ ID NO: 4368 - RNA, 20 nt, Homo sapiens
  source 1..20: mol_type = other RNA
gatgatgttctggaccagat

SEQ ID NO: 4369 - RNA, 20 nt, Homo sapiens
  source 1..20: mol_type = other RNA
acgagtgtttgggcgcatgg

SEQ ID NO: 4370 - RNA, 20 nt, Homo sapiens
  source 1..20: mol_type = other RNA
tgggcaagttggcctatgag

SEQ ID NO: 4371 - RNA, 20 nt, Homo sapiens
  source 1..20: mol_type = other RNA
aaccgcagatctcaccatag

SEQ ID NO: 4372 - RNA, 20 nt, Homo sapiens
  source 1..20: mol_type = other RNA
gaagcccccccatgaacatg

SEQ ID NO: 4373 - RNA, 20 nt, Homo sapiens
  source 1..20: mol_type = other RNA
tggcatggttgatttgcatg

SEQ ID NO: 4374 - RNA, 20 nt, Homo sapiens
  source 1..20: mol_type = other RNA
accaccttggacacacacac

SEQ ID NO: 4375 - RNA, 20 nt, Homo sapiens
  source 1..20: mol_type = other RNA
caggatcagttaaatcgccg

SEQ ID NO: 4376 - RNA, 20 nt, Homo sapiens
  source 1..20: mol_type = other RNA
gtacgaagctgagcgcacgg

SEQ ID NO: 4377 - RNA, 20 nt, Homo sapiens
  source 1..20: mol_type = other RNA
ctgaaggaaaggtgcttccg

SEQ ID NO: 4378 - RNA, 20 nt, Homo sapiens
  source 1..20: mol_type = other RNA
caagaccgtccgaaatccct

SEQ ID NO: 4379 - RNA, 20 nt, Homo sapiens
  source 1..20: mol_type = other RNA
ggtaccagtgcttgactagg

SEQ ID NO: 4380 - RNA, 20 nt, Homo sapiens
  source 1..20: mol_type = other RNA
tcatccgcctagtcaagcac

SEQ ID NO: 4381 - RNA, 20 nt, Homo sapiens
  source 1..20: mol_type = other RNA
atgagcttgacatagatttg

SEQ ID NO: 4382 - RNA, 20 nt, Homo sapiens
  source 1..20: mol_type = other RNA
atttaactgatcctgaaaag

SEQ ID NO: 4383 - RNA, 20 nt, Homo sapiens
  source 1..20: mol_type = other RNA
acacagggtaggagctacct

SEQ ID NO: 4384 - RNA, 20 nt, Homo sapiens
  source 1..20: mol_type = other RNA
tcagtacgaagctgagcgca

SEQ ID NO: 4385 - RNA, 20 nt, Homo sapiens
  source 1..20: mol_type = other RNA
cgaacaggtcagttgactgg

SEQ ID NO: 4386 - RNA, 20 nt, Homo sapiens
  source 1..20: mol_type = other RNA
tttggtaccagtgcttgact

SEQ ID NO: 4387 - RNA, 20 nt, Homo sapiens
  source 1..20: mol_type = other RNA
tgagcttgacatagatttgg

SEQ ID NO: 4388 - RNA, 20 nt, Homo sapiens
  source 1..20: mol_type = other RNA
agtacgaagctgagcgcacg

SEQ ID NO: 4389 - RNA, 20 nt, Homo sapiens
  source 1..20: mol_type = other RNA
cggtctatgcttgggagcga

SEQ ID NO: 4390 - RNA, 20 nt, Homo sapiens
  source 1..20: mol_type = other RNA
gaaaagtggtgagaggactg

SEQ ID NO: 4391 - RNA, 20 nt, Homo sapiens
  source 1..20: mol_type = other RNA
gaggtccaggctccacgctg

SEQ ID NO: 4392 - RNA, 20 nt, Homo sapiens
  source 1..20: mol_type = other RNA
acacatttcaacacagccca

SEQ ID NO: 4393 - RNA, 20 nt, Homo sapiens
  source 1..20: mol_type = other RNA
actgagttcgctccagctcg

SEQ ID NO: 4394 - RNA, 20 nt, Homo sapiens
  source 1..20: mol_type = other RNA
ccctgtgtgtgtgtccaagg

SEQ ID NO: 4395 - RNA, 20 nt, Homo sapiens
  source 1..20: mol_type = other RNA
tcaggatcagttaaatcgcc

SEQ ID NO: 4396 - RNA, 20 nt, Homo sapiens
  source 1..20: mol_type = other RNA
caaccaggtcagcgtcagat

SEQ ID NO: 4397 - RNA, 20 nt, Homo sapiens
  source 1..20: mol_type = other RNA
atagaccgtcaggagctcca

SEQ ID NO: 4398 - RNA, 20 nt, Homo sapiens
  source 1..20: mol_type = other RNA
tgcaccagctccaatcagcg

SEQ ID NO: 4399 - RNA, 20 nt, Homo sapiens
  source 1..20: mol_type = other RNA
cttactcagagcgttgaagg

SEQ ID NO: 4400 - RNA, 20 nt, Homo sapiens
  source 1..20: mol_type = other RNA
agggcatacggagacagcga

SEQ ID NO: 4401 - RNA, 20 nt, Homo sapiens
  source 1..20: mol_type = other RNA
cgagcggcacaaaatcgtca

SEQ ID NO: 4402 - RNA, 20 nt, Homo sapiens
  source 1..20: mol_type = other RNA
tgagctctcgatagatccag

SEQ ID NO: 4403 - RNA, 20 nt, Homo sapiens
  source 1..20: mol_type = other RNA
acacctcccaaaaaaacgag

SEQ ID NO: 4404 - RNA, 20 nt, Homo sapiens
  source 1..20: mol_type = other RNA
tgaaggcgtcagaaccgtac

SEQ ID NO: 4405 - RNA, 20 nt, Homo sapiens
  source 1..20: mol_type = other RNA
gagataaaatatgctggcaa

SEQ ID NO: 4406 - RNA, 20 nt, Homo sapiens
  source 1..20: mol_type = other RNA
gacccaaccaataatgtgag

SEQ ID NO: 4407 - RNA, 20 nt, Homo sapiens
  source 1..20: mol_type = other RNA
gaagctgtgtatctattgga

SEQ ID NO: 4408 - RNA, 20 nt, Homo sapiens
  source 1..20: mol_type = other RNA
tgacatcctcgataaaactg

SEQ ID NO: 4409 - RNA, 20 nt, Homo sapiens
  source 1..20: mol_type = other RNA
gctgcttacggtgtatgcct

SEQ ID NO: 4410 - RNA, 20 nt, Homo sapiens
  source 1..20: mol_type = other RNA
gaagaggacaagggtaccat

SEQ ID NO: 4411 - RNA, 20 nt, Homo sapiens
  source 1..20: mol_type = other RNA
tagggaggatcaaccgccaa

SEQ ID NO: 4412 - RNA, 20 nt, Homo sapiens
  source 1..20: mol_type = other RNA
ttggcggttgatcctcccta

SEQ ID NO: 4413 - RNA, 20 nt, Homo sapiens
  source 1..20: mol_type = other RNA
gttatggaacacgacgagat

SEQ ID NO: 4414 - RNA, 20 nt, Homo sapiens
  source 1..20: mol_type = other RNA
agaacattccaagatggtgc

SEQ ID NO: 4415 - RNA, 20 nt, Homo sapiens
  source 1..20: mol_type = other RNA
caggttgggagaagtcaacc

SEQ ID NO: 4416 - RNA, 20 nt, Homo sapiens
  source 1..20: mol_type = other RNA
agttctgtctgttcacgaag

SEQ ID NO: 4417 - RNA, 20 nt, Homo sapiens
  source 1..20: mol_type = other RNA
ggcagggtggctcctatgga

SEQ ID NO: 4418 - RNA, 20 nt, Homo sapiens
  source 1..20: mol_type = other RNA
gcaccactcttcacgacccc

SEQ ID NO: 4419 - RNA, 20 nt, Homo sapiens
  source 1..20: mol_type = other RNA
tgaaaaaagaagctcaaacc

SEQ ID NO: 4420 - RNA, 20 nt, Homo sapiens
  source 1..20: mol_type = other RNA
gtgacatcctcgataaaact

SEQ ID NO: 4421 - RNA, 20 nt, Homo sapiens
  source 1..20: mol_type = other RNA
ggacggaaaacagtcttaag

SEQ ID NO: 4422 - RNA, 20 nt, Homo sapiens
  source 1..20: mol_type = other RNA
gataagacaaatgccagtcc

SEQ ID NO: 4423 - RNA, 20 nt, Homo sapiens
  source 1..20: mol_type = other RNA
gatgggacatcgttgctcag

SEQ ID NO: 4424 - RNA, 20 nt, Homo sapiens
  source 1..20: mol_type = other RNA
actccacaatgcaatcattg

SEQ ID NO: 4425 - RNA, 20 nt, Homo sapiens
  source 1..20: mol_type = other RNA
aatcctcaatgattgcattg

SEQ ID NO: 4426 - RNA, 20 nt, Homo sapiens
  source 1..20: mol_type = other RNA
tggtgaagacgagagcatcg

SEQ ID NO: 4427 - RNA, 20 nt, Homo sapiens
  source 1..20: mol_type = other RNA
agagaaatttcgtgaaacat

SEQ ID NO: 4428 - RNA, 20 nt, Homo sapiens
  source 1..20: mol_type = other RNA
agcatcacaaagatgttctg

SEQ ID NO: 4429 - RNA, 20 nt, Homo sapiens
  source 1..20: mol_type = other RNA
ggttctcaggagcaccagag

SEQ ID NO: 4430 - RNA, 20 nt, Homo sapiens
  source 1..20: mol_type = other RNA
caggagcaggtccatcacag

SEQ ID NO: 4431 - RNA, 20 nt, Homo sapiens
  source 1..20: mol_type = other RNA
aagttcaagagcatagagag

SEQ ID NO: 4432 - RNA, 20 nt, Homo sapiens
  source 1..20: mol_type = other RNA
agaagttcaagagcatagag

SEQ ID NO: 4433 - RNA, 20 nt, Homo sapiens
  source 1..20: mol_type = other RNA
tcctgcgcctggtgaaacac

SEQ ID NO: 4434 - RNA, 20 nt, Homo sapiens
  source 1..20: mol_type = other RNA
ggtctatgtgagcctgatca

SEQ ID NO: 4435 - RNA, 20 nt, Homo sapiens
  source 1..20: mol_type = other RNA
agcatttccaggggaagcgt

SEQ ID NO: 4436 - RNA, 20 nt, Homo sapiens
  source 1..20: mol_type = other RNA
acgtggcagaagggtacaga

SEQ ID NO: 4437 - RNA, 20 nt, Homo sapiens
  source 1..20: mol_type = other RNA
gatggtgaagacgagagcat

SEQ ID NO: 4438 - RNA, 20 nt, Homo sapiens
  source 1..20: mol_type = other RNA
attgtggagtgtgtagtact

SEQ ID NO: 4439 - RNA, 20 nt, Homo sapiens
  source 1..20: mol_type = other RNA
gagaatttcatgttggacga

SEQ ID NO: 4440 - RNA, 20 nt, Homo sapiens
  source 1..20: mol_type = other RNA
ggctgatatggaaaaccatg

SEQ ID NO: 4441 - RNA, 20 nt, Homo sapiens
  source 1..20: mol_type = other RNA
gagaaccgtgccattcccga

SEQ ID NO: 4442 - RNA, 20 nt, Homo sapiens
  source 1..20: mol_type = other RNA
cgtggcagaagggtacagat

SEQ ID NO: 4443 - RNA, 20 nt, Homo sapiens
  source 1..20: mol_type = other RNA
gtcttcaccatccagaccag

SEQ ID NO: 4444 - RNA, 20 nt, Homo sapiens
  source 1..20: mol_type = other RNA
gctagacgctgtgcggaccg

SEQ ID NO: 4445 - RNA, 20 nt, Homo sapiens
  source 1..20: mol_type = other RNA
acttctaaccatctatgcct

SEQ ID NO: 4446 - RNA, 20 nt, Homo sapiens
  source 1..20: mol_type = other RNA
caggctcacatagacctcag

SEQ ID NO: 4447 - RNA, 20 nt, Homo sapiens
  source 1..20: mol_type = other RNA
tcttccttccactcccggtg

SEQ ID NO: 4448 - RNA, 20 nt, Homo sapiens
  source 1..20: mol_type = other RNA
agtctaagcaaatcacgtgg

SEQ ID NO: 4449 - RNA, 20 nt, Homo sapiens
  source 1..20: mol_type = other RNA
tacttactgcactagtccca

SEQ ID NO: 4450 - RNA, 20 nt, Homo sapiens
  source 1..20: mol_type = other RNA
atgctagacttacccacaca

SEQ ID NO: 4451 - RNA, 20 nt, Homo sapiens
  source 1..20: mol_type = other RNA
agacttacccacacaaggca

SEQ ID NO: 4452 - RNA, 20 nt, Homo sapiens
  source 1..20: mol_type = other RNA
aggtggttgctaagcgacag

SEQ ID NO: 4453 - RNA, 20 nt, Homo sapiens
  source 1..20: mol_type = other RNA
aacagtctaagcaaatcacg

SEQ ID NO: 4454 - RNA, 20 nt, Homo sapiens
  source 1..20: mol_type = other RNA
aggcgacgaccccagaaacg

SEQ ID NO: 4455 - RNA, 20 nt, Homo sapiens
  source 1..20: mol_type = other RNA
acctgatcgcaacaaatagt

SEQ ID NO: 4456 - RNA, 20 nt, Homo sapiens
  source 1..20: mol_type = other RNA
caagaaatgaatgcaactgg

SEQ ID NO: 4457 - RNA, 20 nt, Homo sapiens
  source 1..20: mol_type = other RNA
agcacaccccacctctgaca

SEQ ID NO: 4458 - RNA, 20 nt, Homo sapiens
  source 1..20: mol_type = other RNA
gtgtgacaagactcaatgat

SEQ ID NO: 4459 - RNA, 20 nt, Homo sapiens
  source 1..20: mol_type = other RNA
tttgttcacgaccctcaact

SEQ ID NO: 4460 - RNA, 20 nt, Homo sapiens
  source 1..20: mol_type = other RNA
gtgatggagctctttaatca

SEQ ID NO: 4461 - RNA, 20 nt, Homo sapiens
  source 1..20: mol_type = other RNA
tagacttacccacacaaggc

SEQ ID NO: 4462 - RNA, 20 nt, Homo sapiens
  source 1..20: mol_type = other RNA
cgacgaccccagaaacgcgg

SEQ ID NO: 4463 - RNA, 20 nt, Homo sapiens
  source 1..20: mol_type = other RNA
ttaattccaaaccggatgag

SEQ ID NO: 4464 - RNA, 20 nt, Homo sapiens
  source 1..20: mol_type = other RNA
agtgcagccgggaaaactca

SEQ ID NO: 4465 - RNA, 20 nt, Homo sapiens
  source 1..20: mol_type = other RNA
ggcaacgctcaccttgaccc

SEQ ID NO: 4466 - RNA, 20 nt, Homo sapiens
  source 1..20: mol_type = other RNA
ttcacattgtgcagagaccg

SEQ ID NO: 4467 - RNA, 20 nt, Homo sapiens
  source 1..20: mol_type = other RNA
ggtggttgctaagcgacagg

SEQ ID NO: 4468 - RNA, 20 nt, Homo sapiens
  source 1..20: mol_type = other RNA
gagtgcagccgggaaaactc

SEQ ID NO: 4469 - RNA, 20 nt, Homo sapiens
  source 1..20: mol_type = other RNA
tcccaaacagaattgtgacc

SEQ ID NO: 4470 - RNA, 20 nt, Homo sapiens
  source 1..20: mol_type = other RNA
gaggtggttgctaagcgaca

SEQ ID NO: 4471 - RNA, 20 nt, Homo sapiens
  source 1..20: mol_type = other RNA
ggcagggagtagccaagttg

SEQ ID NO: 4472 - RNA, 20 nt, Homo sapiens
  source 1..20: mol_type = other RNA
tcctcccaggagactctgtg

SEQ ID NO: 4473 - RNA, 20 nt, Homo sapiens
  source 1..20: mol_type = other RNA
cgtgtcacacaactgcccaa

SEQ ID NO: 4474 - RNA, 20 nt, Homo sapiens
  source 1..20: mol_type = other RNA
gcccacgacaccaaccacca

SEQ ID NO: 4475 - RNA, 20 nt, Homo sapiens
  source 1..20: mol_type = other RNA
cccttcggtcaccacgagca

SEQ ID NO: 4476 - RNA, 20 nt, Homo sapiens
  source 1..20: mol_type = other RNA
agccggccagttccaaaccc

SEQ ID NO: 4477 - RNA, 20 nt, Homo sapiens
  source 1..20: mol_type = other RNA
cacctacctaagaaccatcc

SEQ ID NO: 4478 - RNA, 20 nt, Homo sapiens
  source 1..20: mol_type = other RNA
gcgtgacttccacatgagcg

SEQ ID NO: 4479 - RNA, 20 nt, Homo sapiens
  source 1..20: mol_type = other RNA
agggcccggcgcaatgacag

SEQ ID NO: 4480 - RNA, 20 nt, Homo sapiens
  source 1..20: mol_type = other RNA
cagttccaaaccctggtggt

SEQ ID NO: 4481 - RNA, 20 nt, Homo sapiens
  source 1..20: mol_type = other RNA
cgcccacgacaccaaccacc

SEQ ID NO: 4482 - RNA, 20 nt, Homo sapiens
  source 1..20: mol_type = other RNA
gtctgggcggtgctacaact

SEQ ID NO: 4483 - RNA, 20 nt, Homo sapiens
  source 1..20: mol_type = other RNA
ccagggagatggccccacag

SEQ ID NO: 4484 - RNA, 20 nt, Homo sapiens
  source 1..20: mol_type = other RNA
gggccctgaccacgctcatg

SEQ ID NO: 4485 - RNA, 20 nt, Homo sapiens
  source 1..20: mol_type = other RNA
gacagcggcacctacctctg

SEQ ID NO: 4486 - RNA, 20 nt, Homo sapiens
  source 1..20: mol_type = other RNA
ggccaggatggttcttaggt

SEQ ID NO: 4487 - RNA, 20 nt, Homo sapiens
  source 1..20: mol_type = other RNA
ccctgctcgtggtgaccgaa

SEQ ID NO: 4488 - RNA, 20 nt, Homo sapiens
  source 1..20: mol_type = other RNA
catgtggaagtcacgcccgt

SEQ ID NO: 4489 - RNA, 20 nt, Homo sapiens
  source 1..20: mol_type = other RNA
cttccacatgagcgtggtca

SEQ ID NO: 4490 - RNA, 20 nt, Homo sapiens
  source 1..20: mol_type = other RNA
ctgcagcttctccaacacat

SEQ ID NO: 4491 - RNA, 20 nt, Homo sapiens
  source 1..20: mol_type = other RNA
gtgtcacacaactgcccaac

SEQ ID NO: 4492 - RNA, 20 nt, Homo sapiens
  source 1..20: mol_type = other RNA
tttgtgcccttccagagaga

SEQ ID NO: 4493 - RNA, 20 nt, Homo sapiens
  source 1..20: mol_type = other RNA
tggcggccaggatggttctt

SEQ ID NO: 4494 - RNA, 20 nt, Homo sapiens
  source 1..20: mol_type = other RNA
cggccagttccaaaccctgg

SEQ ID NO: 4495 - RNA, 20 nt, Homo sapiens
  source 1..20: mol_type = other RNA
cagcaaccagacggacaagc

SEQ ID NO: 4496 - RNA, 20 nt, Homo sapiens
  source 1..20: mol_type = other RNA
cagcctggtgctgctagtct

SEQ ID NO: 4497 - RNA, 20 nt, Homo sapiens
  source 1..20: mol_type = other RNA
gctctctttgatctgcgcct

SEQ ID NO: 4498 - RNA, 20 nt, Homo sapiens
  source 1..20: mol_type = other RNA
gtggagagtggactcaaacg

SEQ ID NO: 4499 - RNA, 20 nt, Homo sapiens
  source 1..20: mol_type = other RNA
gctgtcacagcacacgaagt

SEQ ID NO: 4500 - RNA, 20 nt, Homo sapiens
  source 1..20: mol_type = other RNA
gcagcctaaagcgtgcaaag

SEQ ID NO: 4501 - RNA, 20 nt, Homo sapiens
  source 1..20: mol_type = other RNA
ggcatagacaagttaccact

SEQ ID NO: 4502 - RNA, 20 nt, Homo sapiens
  source 1..20: mol_type = other RNA
cacttaaaacccagcgacgg

SEQ ID NO: 4503 - RNA, 20 nt, Homo sapiens
  source 1..20: mol_type = other RNA
ttgctgtatgactctcccag

SEQ ID NO: 4504 - RNA, 20 nt, Homo sapiens
  source 1..20: mol_type = other RNA
ctgcacttaaaacccagcga

SEQ ID NO: 4505 - RNA, 20 nt, Homo sapiens
  source 1..20: mol_type = other RNA
agtttgctcactaactggaa

SEQ ID NO: 4506 - RNA, 20 nt, Homo sapiens
  source 1..20: mol_type = other RNA
agtattgcactaactatcca

SEQ ID NO: 4507 - RNA, 20 nt, Homo sapiens
  source 1..20: mol_type = other RNA
aagcacgcatgaactccaag

SEQ ID NO: 4508 - RNA, 20 nt, Homo sapiens
  source 1..20: mol_type = other RNA
gccaagattccagctaaggt

SEQ ID NO: 4509 - RNA, 20 nt, Homo sapiens
  source 1..20: mol_type = other RNA
gaacaactctatccacatag

SEQ ID NO: 4510 - RNA, 20 nt, Homo sapiens
  source 1..20: mol_type = other RNA
gggcaacagaacgcggatga

SEQ ID NO: 4511 - RNA, 20 nt, Homo sapiens
  source 1..20: mol_type = other RNA
caaaactttatgtgaccgtg

SEQ ID NO: 4512 - RNA, 20 nt, Homo sapiens
  source 1..20: mol_type = other RNA
cagataaccatgatcgggag

SEQ ID NO: 4513 - RNA, 20 nt, Homo sapiens
  source 1..20: mol_type = other RNA
ttcaagagataggaccccag

SEQ ID NO: 4514 - RNA, 20 nt, Homo sapiens
  source 1..20: mol_type = other RNA
ccagcaagacaaacgcctct

SEQ ID NO: 4515 - RNA, 20 nt, Homo sapiens
  source 1..20: mol_type = other RNA
ctttgtgaaggctaactctg

SEQ ID NO: 4516 - RNA, 20 nt, Homo sapiens
  source 1..20: mol_type = other RNA
agatgaaatctggaatgacc

SEQ ID NO: 4517 - RNA, 20 nt, Homo sapiens
  source 1..20: mol_type = other RNA
tacaaagctcacatcctggt

SEQ ID NO: 4518 - RNA, 20 nt, Homo sapiens
  source 1..20: mol_type = other RNA
agagggacaaccccgccacg

SEQ ID NO: 4519 - RNA, 20 nt, Homo sapiens
  source 1..20: mol_type = other RNA
aggcatagacaagttaccac

SEQ ID NO: 4520 - RNA, 20 nt, Homo sapiens
  source 1..20: mol_type = other RNA
atgatcagcgtgcttcgagc

SEQ ID NO: 4521 - RNA, 20 nt, Homo sapiens
  source 1..20: mol_type = other RNA
aggaactagtgacagaacta

SEQ ID NO: 4522 - RNA, 20 nt, Homo sapiens
  source 1..20: mol_type = other RNA
ccctgctcttcacgggcgtg

SEQ ID NO: 4523 - RNA, 20 nt, Homo sapiens
  source 1..20: mol_type = other RNA
ccttgaccgagtgaaactca

SEQ ID NO: 4524 - RNA, 20 nt, Homo sapiens
  source 1..20: mol_type = other RNA
gctccacactaaatccgcag

SEQ ID NO: 4525 - RNA, 20 nt, Homo sapiens
  source 1..20: mol_type = other RNA
tgaagtccgtgagtttcact

SEQ ID NO: 4526 - RNA, 20 nt, Homo sapiens
  source 1..20: mol_type = other RNA
actcggtcaaggttgttgga

SEQ ID NO: 4527 - RNA, 20 nt, Homo sapiens
  source 1..20: mol_type = other RNA
ctgatgaagatgccggccag

SEQ ID NO: 4528 - RNA, 20 nt, Homo sapiens
  source 1..20: mol_type = other RNA
gggactgggatcgaacaaca

SEQ ID NO: 4529 - RNA, 20 nt, Homo sapiens
  source 1..20: mol_type = other RNA
aggtggggcttccgtaagtg

SEQ ID NO: 4530 - RNA, 20 nt, Homo sapiens
  source 1..20: mol_type = other RNA
tcgggtcccttatccgcacc

SEQ ID NO: 4531 - RNA, 20 nt, Homo sapiens
  source 1..20: mol_type = other RNA
gaacgggggtttgtcaagca

SEQ ID NO: 4532 - RNA, 20 nt, Homo sapiens
  source 1..20: mol_type = other RNA
actgcggatttagtgtggag

SEQ ID NO: 4533 - RNA, 20 nt, Homo sapiens
  source 1..20: mol_type = other RNA
aggaaggaaacatggaactc

SEQ ID NO: 4534 - RNA, 20 nt, Homo sapiens
  source 1..20: mol_type = other RNA
tcccctttcccaacaccatg

SEQ ID NO: 4535 - RNA, 20 nt, Homo sapiens
  source 1..20: mol_type = other RNA
cttccataccatccactggc

SEQ ID NO: 4536 - RNA, 20 nt, Homo sapiens
  source 1..20: mol_type = other RNA
catggaatatgtcaacggtg

SEQ ID NO: 4537 - RNA, 20 nt, Homo sapiens
  source 1..20: mol_type = other RNA
ggaactcaggcagaaattcg

SEQ ID NO: 4538 - RNA, 20 nt, Homo sapiens
  source 1..20: mol_type = other RNA
gtaaaggactcattccactg

SEQ ID NO: 4539 - RNA, 20 nt, Homo sapiens
  source 1..20: mol_type = other RNA
attccactgcggatttagtg

SEQ ID NO: 4540 - RNA, 20 nt, Homo sapiens
  source 1..20: mol_type = other RNA
ggatcggctgtacttcgtca

SEQ ID NO: 4541 - RNA, 20 nt, Homo sapiens
  source 1..20: mol_type = other RNA
tacaacgtacccattccgga

SEQ ID NO: 4542 - RNA, 20 nt, Homo sapiens
  source 1..20: mol_type = other RNA
gtcatggaatatgtcaacgg

SEQ ID NO: 4543 - RNA, 20 nt, Homo sapiens
  source 1..20: mol_type = other RNA
acaacgtacccattccggaa

SEQ ID NO: 4544 - RNA, 20 nt, Homo sapiens
  source 1..20: mol_type = other RNA
cagtgtgatccattccgcag

SEQ ID NO: 4545 - RNA, 20 nt, Homo sapiens
  source 1..20: mol_type = other RNA
aaagcccgtttggatccata

SEQ ID NO: 4546 - RNA, 20 nt, Homo sapiens
  source 1..20: mol_type = other RNA
tggaccacaaaacagcaaac

SEQ ID NO: 4547 - RNA, 20 nt, Homo sapiens
  source 1..20: mol_type = other RNA
atgtaccacattcagcaagt

SEQ ID NO: 4548 - RNA, 20 nt, Homo sapiens
  source 1..20: mol_type = other RNA
catggtgaactactacacct

SEQ ID NO: 4549 - RNA, 20 nt, Homo sapiens
  source 1..20: mol_type = other RNA
cgtggacgttcggaacggaa

SEQ ID NO: 4550 - RNA, 20 nt, Homo sapiens
  source 1..20: mol_type = other RNA
agggggaagtcatctccctg

SEQ ID NO: 4551 - RNA, 20 nt, Homo sapiens
  source 1..20: mol_type = other RNA
cgaggtgtagtagttcacca

SEQ ID NO: 4552 - RNA, 20 nt, Homo sapiens
  source 1..20: mol_type = other RNA
tcggtgacccctgtgctgcg

SEQ ID NO: 4553 - RNA, 20 nt, Homo sapiens
  source 1..20: mol_type = other RNA
gctccccatcgacgtcacgg

SEQ ID NO: 4554 - RNA, 20 nt, Homo sapiens
  source 1..20: mol_type = other RNA
ggcgccgtggacgttcggaa

SEQ ID NO: 4555 - RNA, 20 nt, Homo sapiens
  source 1..20: mol_type = other RNA
cttcatcgagatgaacacgg

SEQ ID NO: 4556 - RNA, 20 nt, Homo sapiens
  source 1..20: mol_type = other RNA
tccccatcgacgtcacggag

SEQ ID NO: 4557 - RNA, 20 nt, Homo sapiens
  source 1..20: mol_type = other RNA
ccccctccgtgacgtcgatg

SEQ ID NO: 4558 - RNA, 20 nt, Homo sapiens
  source 1..20: mol_type = other RNA
gaagctccccatcgacgtca

SEQ ID NO: 4559 - RNA, 20 nt, Homo sapiens
  source 1..20: mol_type = other RNA
tagaggggacgcctgcactt

SEQ ID NO: 4560 - RNA, 20 nt, Homo sapiens
  source 1..20: mol_type = other RNA
ggccttcatcgagatgaaca

SEQ ID NO: 4561 - RNA, 20 nt, Homo sapiens
  source 1..20: mol_type = other RNA
ctccccatcgacgtcacgga

SEQ ID NO: 4562 - RNA, 20 nt, Homo sapiens
  source 1..20: mol_type = other RNA
ctttccgttccgaacgtcca

SEQ ID NO: 4563 - RNA, 20 nt, Homo sapiens
  source 1..20: mol_type = other RNA
gaggttggtgaccttcccaa

SEQ ID NO: 4564 - RNA, 20 nt, Homo sapiens
  source 1..20: mol_type = other RNA
ccggatgtggatcactctag

SEQ ID NO: 4565 - RNA, 20 nt, Homo sapiens
  source 1..20: mol_type = other RNA
ccacgatgatcctgagcacg

SEQ ID NO: 4566 - RNA, 20 nt, Homo sapiens
  source 1..20: mol_type = other RNA
gctggaccagaccatggccg

SEQ ID NO: 4567 - RNA, 20 nt, Homo sapiens
  source 1..20: mol_type = other RNA
ggggtccgcatactgcagca

SEQ ID NO: 4568 - RNA, 20 nt, Homo sapiens
  source 1..20: mol_type = other RNA
ccccgtgctcaggatcatcg

SEQ ID NO: 4569 - RNA, 20 nt, Homo sapiens
  source 1..20: mol_type = other RNA
cgacagctctcccaaccagg

SEQ ID NO: 4570 - RNA, 20 nt, Homo sapiens
  source 1..20: mol_type = other RNA
gcaggtcggatcgccatccc

SEQ ID NO: 4571 - RNA, 20 nt, Homo sapiens
  source 1..20: mol_type = other RNA
gttgtacttgacgttgaggc

SEQ ID NO: 4572 - RNA, 20 nt, Homo sapiens
  source 1..20: mol_type = other RNA
aatgacagcaagaagttcaa

SEQ ID NO: 4573 - RNA, 20 nt, Homo sapiens
  source 1..20: mol_type = other RNA
ccgggctgcgcttatcgcga

SEQ ID NO: 4574 - RNA, 20 nt, Homo sapiens
  source 1..20: mol_type = other RNA
gcactttatagaccagcacc

SEQ ID NO: 4575 - RNA, 20 nt, Homo sapiens
  source 1..20: mol_type = other RNA
ccctcgcgataagcgcagcc

SEQ ID NO: 4576 - RNA, 20 nt, Homo sapiens
  source 1..20: mol_type = other RNA
accgggctgcgcttatcgcg

SEQ ID NO: 4577 - RNA, 20 nt, Homo sapiens
  source 1..20: mol_type = other RNA
tgcactttatagaccagcac

SEQ ID NO: 4578 - RNA, 20 nt, Homo sapiens
  source 1..20: mol_type = other RNA
ggtgctggtctataaagtgc

SEQ ID NO: 4579 - RNA, 20 nt, Homo sapiens
  source 1..20: mol_type = other RNA
gctggagaacctgaccgccg

SEQ ID NO: 4580 - RNA, 20 nt, Homo sapiens
  source 1..20: mol_type = other RNA
gtctataaagtgcaggcctg

SEQ ID NO: 4581 - RNA, 20 nt, Homo sapiens
  source 1..20: mol_type = other RNA
agcttctacctggagaccta

SEQ ID NO: 4582 - RNA, 20 nt, Homo sapiens
  source 1..20: mol_type = other RNA
atggacagcagcgcgccccg

SEQ ID NO: 4583 - RNA, 20 nt, Homo sapiens
  source 1..20: mol_type = other RNA
gctaacgtgctgcgcgacat

SEQ ID NO: 4584 - RNA, 20 nt, Homo sapiens
  source 1..20: mol_type = other RNA
catgtcgcgcagcacgttag

SEQ ID NO: 4585 - RNA, 20 nt, Homo sapiens
  source 1..20: mol_type = other RNA
gatccaggcccctcctcagt

SEQ ID NO: 4586 - RNA, 20 nt, Homo sapiens
  source 1..20: mol_type = other RNA
cgataagcgcagcccggtgc

SEQ ID NO: 4587 - RNA, 20 nt, Homo sapiens
  source 1..20: mol_type = other RNA
cgcccgtagccctcgcgcag

SEQ ID NO: 4588 - RNA, 20 nt, Homo sapiens
  source 1..20: mol_type = other RNA
gaacttcttgagctcctcgg

SEQ ID NO: 4589 - RNA, 20 nt, Homo sapiens
  source 1..20: mol_type = other RNA
gttcaagctgaagctgctgt

SEQ ID NO: 4590 - RNA, 20 nt, Homo sapiens
  source 1..20: mol_type = other RNA
gtcggcagccaagccaggtg

SEQ ID NO: 4591 - RNA, 20 nt, Homo sapiens
  source 1..20: mol_type = other RNA
agctgaccagcttgtcggtg

SEQ ID NO: 4592 - RNA, 20 nt, Homo sapiens
  source 1..20: mol_type = other RNA
agcggtgagctcggcgccgt

SEQ ID NO: 4593 - RNA, 20 nt, Homo sapiens
  source 1..20: mol_type = other RNA
cagcacgttagcggtgagct

SEQ ID NO: 4594 - RNA, 20 nt, Homo sapiens
  source 1..20: mol_type = other RNA
ggctacgggcgcatcccgcg

SEQ ID NO: 4595 - RNA, 20 nt, Homo sapiens
  source 1..20: mol_type = other RNA
cgctaacgtgctgcgcgaca

SEQ ID NO: 4596 - RNA, 20 nt, Homo sapiens
  source 1..20: mol_type = other RNA
ggcctggatcccagctggcg

SEQ ID NO: 4597 - RNA, 20 nt, Homo sapiens
  source 1..20: mol_type = other RNA
gatggccgggcagctgcagg

SEQ ID NO: 4598 - RNA, 20 nt, Homo sapiens
  source 1..20: mol_type = other RNA
agaagacccaataatcgcga

SEQ ID NO: 4599 - RNA, 20 nt, Homo sapiens
  source 1..20: mol_type = other RNA
caaacgtaatagtctcctag

SEQ ID NO: 4600 - RNA, 20 nt, Homo sapiens
  source 1..20: mol_type = other RNA
ccaaacgtttgaggttccaa

SEQ ID NO: 4601 - RNA, 20 nt, Homo sapiens
  source 1..20: mol_type = other RNA
actggcagttgcgtgacggt

SEQ ID NO: 4602 - RNA, 20 nt, Homo sapiens
  source 1..20: mol_type = other RNA
accagcttcagatacagaag

SEQ ID NO: 4603 - RNA, 20 nt, Homo sapiens
  source 1..20: mol_type = other RNA
tcagcaaggtctcccagtgt

SEQ ID NO: 4604 - RNA, 20 nt, Homo sapiens
  source 1..20: mol_type = other RNA
cggttgcttggggtgcatgc

SEQ ID NO: 4605 - RNA, 20 nt, Homo sapiens
  source 1..20: mol_type = other RNA
ctcttcctgaagcttacctg

SEQ ID NO: 4606 - RNA, 20 nt, Homo sapiens
  source 1..20: mol_type = other RNA
aagaggcttcattcacctct

SEQ ID NO: 4607 - RNA, 20 nt, Homo sapiens
  source 1..20: mol_type = other RNA
tcagattgctgacttgatgg

SEQ ID NO: 4608 - RNA, 20 nt, Homo sapiens
  source 1..20: mol_type = other RNA
gttgcgtgacggttggccaa

SEQ ID NO: 4609 - RNA, 20 nt, Homo sapiens
  source 1..20: mol_type = other RNA
tgcgcagagcctaaaaccat

SEQ ID NO: 4610 - RNA, 20 nt, Homo sapiens
  source 1..20: mol_type = other RNA
ttgcccaaaccggcatcacc

SEQ ID NO: 4611 - RNA, 20 nt, Homo sapiens
  source 1..20: mol_type = other RNA
attgaatccattccagtcaa

SEQ ID NO: 4612 - RNA, 20 nt, Homo sapiens
  source 1..20: mol_type = other RNA
ggaacctcaaacgtttggtc

SEQ ID NO: 4613 - RNA, 20 nt, Homo sapiens
  source 1..20: mol_type = other RNA
gccagcacgtccacagccat

SEQ ID NO: 4614 - RNA, 20 nt, Homo sapiens
  source 1..20: mol_type = other RNA
ctctaggagactattacgtt

SEQ ID NO: 4615 - RNA, 20 nt, Homo sapiens
  source 1..20: mol_type = other RNA
tcgcgattattgggtcttct

SEQ ID NO: 4616 - RNA, 20 nt, Homo sapiens
  source 1..20: mol_type = other RNA
acccaacacttcctcaactg

SEQ ID NO: 4617 - RNA, 20 nt, Homo sapiens
  source 1..20: mol_type = other RNA
agaggagactcttggacctc

SEQ ID NO: 4618 - RNA, 20 nt, Homo sapiens
  source 1..20: mol_type = other RNA
agatgtccaaagagcagact

SEQ ID NO: 4619 - RNA, 20 nt, Homo sapiens
  source 1..20: mol_type = other RNA
gattattcctttgactggaa

SEQ ID NO: 4620 - RNA, 20 nt, Homo sapiens
  source 1..20: mol_type = other RNA
ttgtgaagaatattgatctt

SEQ ID NO: 4621 - RNA, 20 nt, Homo sapiens
  source 1..20: mol_type = other RNA
gacacagttctttcatgtga

SEQ ID NO: 4622 - RNA, 20 nt, Homo sapiens
  source 1..20: mol_type = other RNA
gttccagtctcttcttcaga

SEQ ID NO: 4623 - RNA, 20 nt, Homo sapiens
  source 1..20: mol_type = other RNA
tcaggctgagaaaaacaaca

SEQ ID NO: 4624 - RNA, 20 nt, Homo sapiens
  source 1..20: mol_type = other RNA
ggaacaagttcagtgaactg

SEQ ID NO: 4625 - RNA, 20 nt, Homo sapiens
  source 1..20: mol_type = other RNA
ctagggcatccaaaaagcca

SEQ ID NO: 4626 - RNA, 20 nt, Homo sapiens
  source 1..20: mol_type = other RNA
ggatccaacttacacttctg

SEQ ID NO: 4627 - RNA, 20 nt, Homo sapiens
  source 1..20: mol_type = other RNA
atgcctgtaactctatacct

SEQ ID NO: 4628 - RNA, 20 nt, Homo sapiens
  source 1..20: mol_type = other RNA
acaataatatgtgctcctac

SEQ ID NO: 4629 - RNA, 20 nt, Homo sapiens
  source 1..20: mol_type = other RNA
ggtgttgtttactagtgttg

SEQ ID NO: 4630 - RNA, 20 nt, Homo sapiens
  source 1..20: mol_type = other RNA
ggcatccccaacaccaaccg

SEQ ID NO: 4631 - RNA, 20 nt, Homo sapiens
  source 1..20: mol_type = other RNA
aaacaacaagggcccaatgg

SEQ ID NO: 4632 - RNA, 20 nt, Homo sapiens
  source 1..20: mol_type = other RNA
gatcagaaatgatatcggtt

SEQ ID NO: 4633 - RNA, 20 nt, Homo sapiens
  source 1..20: mol_type = other RNA
aagagaatctgcaaagacct

SEQ ID NO: 4634 - RNA, 20 nt, Homo sapiens
  source 1..20: mol_type = other RNA
ttggatgccctagaccatgc

SEQ ID NO: 4635 - RNA, 20 nt, Homo sapiens
  source 1..20: mol_type = other RNA
catcttaaaaaattcccaca

SEQ ID NO: 4636 - RNA, 20 nt, Homo sapiens
  source 1..20: mol_type = other RNA
tgcatgctcactgataatga

SEQ ID NO: 4637 - RNA, 20 nt, Homo sapiens
  source 1..20: mol_type = other RNA
gaacacagaaatatgaacaa

SEQ ID NO: 4638 - RNA, 20 nt, Homo sapiens
  source 1..20: mol_type = other RNA
aatgcctgtaactctatacc

SEQ ID NO: 4639 - RNA, 20 nt, Homo sapiens
  source 1..20: mol_type = other RNA
gaactaacctgcatggtcta

SEQ ID NO: 4640 - RNA, 20 nt, Homo sapiens
  source 1..20: mol_type = other RNA
gaaaaacaacaagggcccaa

SEQ ID NO: 4641 - RNA, 20 nt, Homo sapiens
  source 1..20: mol_type = other RNA
aaagtaaagatggatagtga

SEQ ID NO: 4642 - RNA, 20 nt, Homo sapiens
  source 1..20: mol_type = other RNA
caggctgagaaaaacaacaa

SEQ ID NO: 4643 - RNA, 20 nt, Homo sapiens
  source 1..20: mol_type = other RNA
cagcttgcagatataatcca

SEQ ID NO: 4644 - RNA, 20 nt, Homo sapiens
  source 1..20: mol_type = other RNA
aacagtcaaacacaatctgg

SEQ ID NO: 4645 - RNA, 20 nt, Homo sapiens
  source 1..20: mol_type = other RNA
acatcatagctcagctgatg

SEQ ID NO: 4646 - RNA, 20 nt, Homo sapiens
  source 1..20: mol_type = other RNA
attgggctgactgcctcggt

SEQ ID NO: 4647 - RNA, 20 nt, Homo sapiens
  source 1..20: mol_type = other RNA
ggaactagaaagtgtttcca

SEQ ID NO: 4648 - RNA, 20 nt, Homo sapiens
  source 1..20: mol_type = other RNA
tacacacagtagataacacg

SEQ ID NO: 4649 - RNA, 20 nt, Homo sapiens
  source 1..20: mol_type = other RNA
ggtccgtacactaacagatg

SEQ ID NO: 4650 - RNA, 20 nt, Homo sapiens
  source 1..20: mol_type = other RNA
gcaggcttcacacataagca

SEQ ID NO: 4651 - RNA, 20 nt, Homo sapiens
  source 1..20: mol_type = other RNA
aagcacctactacgaatagg

SEQ ID NO: 4652 - RNA, 20 nt, Homo sapiens
  source 1..20: mol_type = other RNA
agcacctactacgaataggt

SEQ ID NO: 4653 - RNA, 20 nt, Homo sapiens
  source 1..20: mol_type = other RNA
tgatcccacctattcgtagt

SEQ ID NO: 4654 - RNA, 20 nt, Homo sapiens
  source 1..20: mol_type = other RNA
gccaagcacctactacgaat

SEQ ID NO: 4655 - RNA, 20 nt, Homo sapiens
  source 1..20: mol_type = other RNA
gggacggctggactatcaca

SEQ ID NO: 4656 - RNA, 20 nt, Homo sapiens
  source 1..20: mol_type = other RNA
accaccttgaagttaatcct

SEQ ID NO: 4657 - RNA, 20 nt, Homo sapiens
  source 1..20: mol_type = other RNA
tttcctcatctgttagtgta

SEQ ID NO: 4658 - RNA, 20 nt, Homo sapiens
  source 1..20: mol_type = other RNA
tattcgtagtaggtgcttgg

SEQ ID NO: 4659 - RNA, 20 nt, Homo sapiens
  source 1..20: mol_type = other RNA
tcaggagatgttgaaaacag

SEQ ID NO: 4660 - RNA, 20 nt, Homo sapiens
  source 1..20: mol_type = other RNA
tgcaggcttcacacataagc

SEQ ID NO: 4661 - RNA, 20 nt, Homo sapiens
  source 1..20: mol_type = other RNA
gctcccagcattgaagatgt

SEQ ID NO: 4662 - RNA, 20 nt, Homo sapiens
  source 1..20: mol_type = other RNA
tctactgtgtgtaagaagga

SEQ ID NO: 4663 - RNA, 20 nt, Homo sapiens
  source 1..20: mol_type = other RNA
gcatgccttgcgaagaacca

SEQ ID NO: 4664 - RNA, 20 nt, Homo sapiens
  source 1..20: mol_type = other RNA
tctgaatcttccttcacaac

SEQ ID NO: 4665 - RNA, 20 nt, Homo sapiens
  source 1..20: mol_type = other RNA
agtctatgagccagttgtga

SEQ ID NO: 4666 - RNA, 20 nt, Homo sapiens
  source 1..20: mol_type = other RNA
aacttgaaacaaactctcaa

SEQ ID NO: 4667 - RNA, 20 nt, Homo sapiens
  source 1..20: mol_type = other RNA
gcagcacaagatcaatctgc

SEQ ID NO: 4668 - RNA, 20 nt, Homo sapiens
  source 1..20: mol_type = other RNA
tgacctacatcttcaatgct

SEQ ID NO: 4669 - RNA, 20 nt, Homo sapiens
  source 1..20: mol_type = other RNA
acttgaaacaaactctcaaa

SEQ ID NO: 4670 - RNA, 20 nt, Homo sapiens
  source 1..20: mol_type = other RNA
aagtgaaatgcttactgtga

SEQ ID NO: 4671 - RNA, 20 nt, Homo sapiens
  source 1..20: mol_type = other RNA
ggactatcacaaggagcagg

SEQ ID NO: 4672 - RNA, 20 nt, Homo sapiens
  source 1..20: mol_type = other RNA
acctattcgtagtaggtgct

SEQ ID NO: 4673 - RNA, 20 nt, Homo sapiens
  source 1..20: mol_type = other RNA
gtcgtctagaagtgaatgag

SEQ ID NO: 4674 - RNA, 20 nt, Homo sapiens
  source 1..20: mol_type = other RNA
tacttacacatccttggact

SEQ ID NO: 4675 - RNA, 20 nt, Homo sapiens
  source 1..20: mol_type = other RNA
gatgtgggatcatagatctc

SEQ ID NO: 4676 - RNA, 20 nt, Homo sapiens
  source 1..20: mol_type = other RNA
ccaaagttagacaaaatgcc

SEQ ID NO: 4677 - RNA, 20 nt, Homo sapiens
  source 1..20: mol_type = other RNA
ggagaatattgagttctggc

SEQ ID NO: 4678 - RNA, 20 nt, Homo sapiens
  source 1..20: mol_type = other RNA
acgacaaaatgcaaaaaagg

SEQ ID NO: 4679 - RNA, 20 nt, Homo sapiens
  source 1..20: mol_type = other RNA
tcattccagattccagatgt

SEQ ID NO: 4680 - RNA, 20 nt, Homo sapiens
  source 1..20: mol_type = other RNA
ttagtgtacttacacatcct

SEQ ID NO: 4681 - RNA, 20 nt, Homo sapiens
  source 1..20: mol_type = other RNA
ctgctgctgaagtaatgcaa

SEQ ID NO: 4682 - RNA, 20 nt, Homo sapiens
  source 1..20: mol_type = other RNA
aatgaaatcttccaagtcca

SEQ ID NO: 4683 - RNA, 20 nt, Homo sapiens
  source 1..20: mol_type = other RNA
gctaacccaaaggaattgaa

SEQ ID NO: 4684 - RNA, 20 nt, Homo sapiens
  source 1..20: mol_type = other RNA
gttcttctctgctaacccaa

SEQ ID NO: 4685 - RNA, 20 nt, Homo sapiens
  source 1..20: mol_type = other RNA
tagacgacaaaatgcaaaaa

SEQ ID NO: 4686 - RNA, 20 nt, Homo sapiens
  source 1..20: mol_type = other RNA
cctaaagtctgaattcagtg

SEQ ID NO: 4687 - RNA, 20 nt, Homo sapiens
  source 1..20: mol_type = other RNA
aatgcaatggtctcaatctc

SEQ ID NO: 4688 - RNA, 20 nt, Homo sapiens
  source 1..20: mol_type = other RNA
gagatctatgatcccacatc

SEQ ID NO: 4689 - RNA, 20 nt, Homo sapiens
  source 1..20: mol_type = other RNA
atagttatacttactttggt

SEQ ID NO: 4690 - RNA, 20 nt, Homo sapiens
  source 1..20: mol_type = other RNA
atgatcccacatctggaatc

SEQ ID NO: 4691 - RNA, 20 nt, Homo sapiens
  source 1..20: mol_type = other RNA
ttagcagagaagaacattcc

SEQ ID NO: 4692 - RNA, 20 nt, Homo sapiens
  source 1..20: mol_type = other RNA
tatatctcttctgctttaca

SEQ ID NO: 4693 - RNA, 20 nt, Homo sapiens
  source 1..20: mol_type = other RNA
gtgaggagaatattgagttc

SEQ ID NO: 4694 - RNA, 20 nt, Homo sapiens
  source 1..20: mol_type = other RNA
ttcattccagattccagatg

SEQ ID NO: 4695 - RNA, 20 nt, Homo sapiens
  source 1..20: mol_type = other RNA
cctcactgaattcagacttt

SEQ ID NO: 4696 - RNA, 20 nt, Homo sapiens
  source 1..20: mol_type = other RNA
gtggttcctttcaattcctt

SEQ ID NO: 4697 - RNA, 20 nt, Homo sapiens
  source 1..20: mol_type = other RNA
gaacaaacttacaaagtctt

SEQ ID NO: 4698 - RNA, 20 nt, Homo sapiens
  source 1..20: mol_type = other RNA
ggtgtaaagagttgcgagtg

SEQ ID NO: 4699 - RNA, 20 nt, Homo sapiens
  source 1..20: mol_type = other RNA
cttcgatacatcaaacagct

SEQ ID NO: 4700 - RNA, 20 nt, Homo sapiens
  source 1..20: mol_type = other RNA
ggatgtctagttcacgcact

SEQ ID NO: 4701 - RNA, 20 nt, Homo sapiens
  source 1..20: mol_type = other RNA
ttaccttcattgtatcaacg

SEQ ID NO: 4702 - RNA, 20 nt, Homo sapiens
  source 1..20: mol_type = other RNA
cgatacatcaaacagctggg

SEQ ID NO: 4703 - RNA, 20 nt, Homo sapiens
  source 1..20: mol_type = other RNA
gtaattaatgatcctatcca

SEQ ID NO: 4704 - RNA, 20 nt, Homo sapiens
  source 1..20: mol_type = other RNA
aaacgagactcatcaagaca

SEQ ID NO: 4705 - RNA, 20 nt, Homo sapiens
  source 1..20: mol_type = other RNA
tccatcccgactacaagaca

SEQ ID NO: 4706 - RNA, 20 nt, Homo sapiens
  source 1..20: mol_type = other RNA
aggatgtctagttcacgcac

SEQ ID NO: 4707 - RNA, 20 nt, Homo sapiens
  source 1..20: mol_type = other RNA
gtgtatcaatgattcggacg

SEQ ID NO: 4708 - RNA, 20 nt, Homo sapiens
  source 1..20: mol_type = other RNA
ccatcccgactacaagacat

SEQ ID NO: 4709 - RNA, 20 nt, Homo sapiens
  source 1..20: mol_type = other RNA
attgtctacttcacagacac

SEQ ID NO: 4710 - RNA, 20 nt, Homo sapiens
  source 1..20: mol_type = other RNA
catcccgactacaagacatg

SEQ ID NO: 4711 - RNA, 20 nt, Homo sapiens
  source 1..20: mol_type = other RNA
atcgatttgagcatagtcta

SEQ ID NO: 4712 - RNA, 20 nt, Homo sapiens
  source 1..20: mol_type = other RNA
tcttcgacaggtgattcaag

SEQ ID NO: 4713 - RNA, 20 nt, Homo sapiens
  source 1..20: mol_type = other RNA
taatggaattaagcctgtca

SEQ ID NO: 4714 - RNA, 20 nt, Homo sapiens
  source 1..20: mol_type = other RNA
agagcttatcaacacaaagt

SEQ ID NO: 4715 - RNA, 20 nt, Homo sapiens
  source 1..20: mol_type = other RNA
tgcagggtggggtatctagc

SEQ ID NO: 4716 - RNA, 20 nt, Homo sapiens
  source 1..20: mol_type = other RNA
cttcaaagccaccgcgcctg

SEQ ID NO: 4717 - RNA, 20 nt, Homo sapiens
  source 1..20: mol_type = other RNA
cccatgtcttgtagtcggga

SEQ ID NO: 4718 - RNA, 20 nt, Homo sapiens
  source 1..20: mol_type = other RNA
gcttagttatatccagcgat

SEQ ID NO: 4719 - RNA, 20 nt, Homo sapiens
  source 1..20: mol_type = other RNA
tcttcgatacatcaaacagc

SEQ ID NO: 4720 - RNA, 20 nt, Homo sapiens
  source 1..20: mol_type = other RNA
ttcacctccgggcgagcaag

SEQ ID NO: 4721 - RNA, 20 nt, Homo sapiens
  source 1..20: mol_type = other RNA
gatgactacatagagattac

SEQ ID NO: 4722 - RNA, 20 nt, Homo sapiens
  source 1..20: mol_type = other RNA
taaaagaaatggcattgatg

SEQ ID NO: 4723 - RNA, 20 nt, Homo sapiens
  source 1..20: mol_type = other RNA
cattggtaagaagatcggtg

SEQ ID NO: 4724 - RNA, 20 nt, Homo sapiens
  source 1..20: mol_type = other RNA
tctgcaggtgtgttaccgag

SEQ ID NO: 4725 - RNA, 20 nt, Homo sapiens
  source 1..20: mol_type = other RNA
atgccagtcgatctgagcat

SEQ ID NO: 4726 - RNA, 20 nt, Homo sapiens
  source 1..20: mol_type = other RNA
gacttccaacccaatgagca

SEQ ID NO: 4727 - RNA, 20 nt, Homo sapiens
  source 1..20: mol_type = other RNA
caactacttcacgaagctag

SEQ ID NO: 4728 - RNA, 20 nt, Homo sapiens
  source 1..20: mol_type = other RNA
cctgatccaaaacttctcgg

SEQ ID NO: 4729 - RNA, 20 nt, Homo sapiens
  source 1..20: mol_type = other RNA
aggcatggtaagggtcattg

SEQ ID NO: 4730 - RNA, 20 nt, Homo sapiens
  source 1..20: mol_type = other RNA
gctagtggaacagtacacca

SEQ ID NO: 4731 - RNA, 20 nt, Homo sapiens
  source 1..20: mol_type = other RNA
tgaactcgctgaccttgtgg

SEQ ID NO: 4732 - RNA, 20 nt, Homo sapiens
  source 1..20: mol_type = other RNA
atgcaggaacacatgcgcat

SEQ ID NO: 4733 - RNA, 20 nt, Homo sapiens
  source 1..20: mol_type = other RNA
tgagaagcagagcgatgatg

SEQ ID NO: 4734 - RNA, 20 nt, Homo sapiens
  source 1..20: mol_type = other RNA
tgaggtgtacgcaccaggtg

SEQ ID NO: 4735 - RNA, 20 nt, Homo sapiens
  source 1..20: mol_type = other RNA
tccaacccaatgagcaaggt

SEQ ID NO: 4736 - RNA, 20 nt, Homo sapiens
  source 1..20: mol_type = other RNA
gagcggcgtactgacatctt

SEQ ID NO: 4737 - RNA, 20 nt, Homo sapiens
  source 1..20: mol_type = other RNA
ccctccccccaccacgccag

SEQ ID NO: 4738 - RNA, 20 nt, Homo sapiens
  source 1..20: mol_type = other RNA
caagatactcatctggagca

SEQ ID NO: 4739 - RNA, 20 nt, Homo sapiens
  source 1..20: mol_type = other RNA
cgcaaggattatgatcccaa

SEQ ID NO: 4740 - RNA, 20 nt, Homo sapiens
  source 1..20: mol_type = other RNA
acctaccttgctcattgggt

SEQ ID NO: 4741 - RNA, 20 nt, Homo sapiens
  source 1..20: mol_type = other RNA
aggtgtgttaccgagtggaa

SEQ ID NO: 4742 - RNA, 20 nt, Homo sapiens
  source 1..20: mol_type = other RNA
ccatgcctactaccgccaca

SEQ ID NO: 4743 - RNA, 20 nt, Homo sapiens
  source 1..20: mol_type = other RNA
aatccttgcggacaatgact

SEQ ID NO: 4744 - RNA, 20 nt, Homo sapiens
  source 1..20: mol_type = other RNA
cttcaccacatccaagtcga

SEQ ID NO: 4745 - RNA, 20 nt, Homo sapiens
  source 1..20: mol_type = other RNA
gcttcgtgaagtagttgaag

SEQ ID NO: 4746 - RNA, 20 nt, Homo sapiens
  source 1..20: mol_type = other RNA
gattatttaccctcctccag

SEQ ID NO: 4747 - RNA, 20 nt, Homo sapiens
  source 1..20: mol_type = other RNA
ggatgacaaacaggagaagg

SEQ ID NO: 4748 - RNA, 20 nt, Homo sapiens
  source 1..20: mol_type = other RNA
taatcttcatcaatcaatag

SEQ ID NO: 4749 - RNA, 20 nt, Homo sapiens
  source 1..20: mol_type = other RNA
atagcggttcaatgaccacg

SEQ ID NO: 4750 - RNA, 20 nt, Homo sapiens
  source 1..20: mol_type = other RNA
tcctggcaagcgagacacac

SEQ ID NO: 4751 - RNA, 20 nt, Homo sapiens
  source 1..20: mol_type = other RNA
cagtaaaagaaaatcacggt

SEQ ID NO: 4752 - RNA, 20 nt, Homo sapiens
  source 1..20: mol_type = other RNA
cctggtgtatcacctcgtcc

SEQ ID NO: 4753 - RNA, 20 nt, Homo sapiens
  source 1..20: mol_type = other RNA
ggagaactaaaagtcgtcaa

SEQ ID NO: 4754 - RNA, 20 nt, Homo sapiens
  source 1..20: mol_type = other RNA
aaaaggatcaagacgctctg

SEQ ID NO: 4755 - RNA, 20 nt, Homo sapiens
  source 1..20: mol_type = other RNA
gagactcctcgaacagatcg

SEQ ID NO: 4756 - RNA, 20 nt, Homo sapiens
  source 1..20: mol_type = other RNA
cagtgctcgtaaaaacagat

SEQ ID NO: 4757 - RNA, 20 nt, Homo sapiens
  source 1..20: mol_type = other RNA
ccagtaaaagaaaatcacgg

SEQ ID NO: 4758 - RNA, 20 nt, Homo sapiens
  source 1..20: mol_type = other RNA
atcattaagcaatgccacag

SEQ ID NO: 4759 - RNA, 20 nt, Homo sapiens
  source 1..20: mol_type = other RNA
tgagacaccaggtcgtgcaa

SEQ ID NO: 4760 - RNA, 20 nt, Homo sapiens
  source 1..20: mol_type = other RNA
actcctcgaacagatcgagg

SEQ ID NO: 4761 - RNA, 20 nt, Homo sapiens
  source 1..20: mol_type = other RNA
aagggtatccgccaacacag

SEQ ID NO: 4762 - RNA, 20 nt, Homo sapiens
  source 1..20: mol_type = other RNA
tttcgagctggagttcgaat

SEQ ID NO: 4763 - RNA, 20 nt, Homo sapiens
  source 1..20: mol_type = other RNA
gagacaccaggtcgtgcaaa

SEQ ID NO: 4764 - RNA, 20 nt, Homo sapiens
  source 1..20: mol_type = other RNA
aatgaatgctaggacttaca

SEQ ID NO: 4765 - RNA, 20 nt, Homo sapiens
  source 1..20: mol_type = other RNA
gcatactccttccttaagat

SEQ ID NO: 4766 - RNA, 20 nt, Homo sapiens
  source 1..20: mol_type = other RNA
aatctgacgcaatgcagcct

SEQ ID NO: 4767 - RNA, 20 nt, Homo sapiens
  source 1..20: mol_type = other RNA
gtcataccacccaaaggtgt

SEQ ID NO: 4768 - RNA, 20 nt, Homo sapiens
  source 1..20: mol_type = other RNA
acaccagctagtcagatggg

SEQ ID NO: 4769 - RNA, 20 nt, Homo sapiens
  source 1..20: mol_type = other RNA
cgaataggaacataaccagc

SEQ ID NO: 4770 - RNA, 20 nt, Homo sapiens
  source 1..20: mol_type = other RNA
ttagttagttgatactactg

SEQ ID NO: 4771 - RNA, 20 nt, Homo sapiens
  source 1..20: mol_type = other RNA
gagccagtaaaagaaaatca

SEQ ID NO: 4772 - RNA, 20 nt, Homo sapiens
  source 1..20: mol_type = other RNA
tatcattaagcaatgccaca

SEQ ID NO: 4773 - RNA, 20 nt, Homo sapiens
  source 1..20: mol_type = other RNA
cagatacaaagacagtgcgg

SEQ ID NO: 4774 - RNA, 20 nt, Homo sapiens
  source 1..20: mol_type = other RNA
cactggtaggacgatgccgg

SEQ ID NO: 4775 - RNA, 20 nt, Homo sapiens
  source 1..20: mol_type = other RNA
cctcactggtaggacgatgc

SEQ ID NO: 4776 - RNA, 20 nt, Homo sapiens
  source 1..20: mol_type = other RNA
cagaaagcgccgcccttggt

SEQ ID NO: 4777 - RNA, 20 nt, Homo sapiens
  source 1..20: mol_type = other RNA
cactgccagaagatcaccgc

SEQ ID NO: 4778 - RNA, 20 nt, Homo sapiens
  source 1..20: mol_type = other RNA
gaagcacttcctaaacatca

SEQ ID NO: 4779 - RNA, 20 nt, Homo sapiens
  source 1..20: mol_type = other RNA
gggcatgaacatgttgacaa

SEQ ID NO: 4780 - RNA, 20 nt, Homo sapiens
  source 1..20: mol_type = other RNA
gctcagatacaaagacagtg

SEQ ID NO: 4781 - RNA, 20 nt, Homo sapiens
  source 1..20: mol_type = other RNA
catgctccagttctacaggt

SEQ ID NO: 4782 - RNA, 20 nt, Homo sapiens
  source 1..20: mol_type = other RNA
tcttctccccagtgtcgggg

SEQ ID NO: 4783 - RNA, 20 nt, Homo sapiens
  source 1..20: mol_type = other RNA
tcagatacaaagacagtgcg

SEQ ID NO: 4784 - RNA, 20 nt, Homo sapiens
  source 1..20: mol_type = other RNA
ccaacagaaagcgccgccct

SEQ ID NO: 4785 - RNA, 20 nt, Homo sapiens
  source 1..20: mol_type = other RNA
ttcccccacatcagtcaggt

SEQ ID NO: 4786 - RNA, 20 nt, Homo sapiens
  source 1..20: mol_type = other RNA
ttgtggctgtgaagtaggaa

SEQ ID NO: 4787 - RNA, 20 nt, Homo sapiens
  source 1..20: mol_type = other RNA
ggggagaagatgaatgtcat

SEQ ID NO: 4788 - RNA, 20 nt, Homo sapiens
  source 1..20: mol_type = other RNA
cggcttcccccacatcagtc

SEQ ID NO: 4789 - RNA, 20 nt, Homo sapiens
  source 1..20: mol_type = other RNA
gcactgtctttgtatctgag

SEQ ID NO: 4790 - RNA, 20 nt, Homo sapiens
  source 1..20: mol_type = other RNA
tcctggcggcatgatcatca

SEQ ID NO: 4791 - RNA, 20 nt, Homo sapiens
  source 1..20: mol_type = other RNA
tgtggctgtgaagtaggaaa

SEQ ID NO: 4792 - RNA, 20 nt, Homo sapiens
  source 1..20: mol_type = other RNA
tcatgctccagttctacagg

SEQ ID NO: 4793 - RNA, 20 nt, Homo sapiens
  source 1..20: mol_type = other RNA
ggcacccagcggcccaccaa

SEQ ID NO: 4794 - RNA, 20 nt, Homo sapiens
  source 1..20: mol_type = other RNA
ctcctacctgactgatgtgg

SEQ ID NO: 4795 - RNA, 20 nt, Homo sapiens
  source 1..20: mol_type = other RNA
tactcactgctgtcgcatca

SEQ ID NO: 4796 - RNA, 20 nt, Homo sapiens
  source 1..20: mol_type = other RNA
tgtgcccccaggcacccaag

SEQ ID NO: 4797 - RNA, 20 nt, Homo sapiens
  source 1..20: mol_type = other RNA
atgtctttccagcttcctgg

SEQ ID NO: 4798 - RNA, 20 nt, Homo sapiens
  source 1..20: mol_type = other RNA
gaccaatctgacatgctgca

SEQ ID NO: 4799 - RNA, 20 nt, Homo sapiens
  source 1..20: mol_type = other RNA
actcagggatctactatgtg

SEQ ID NO: 4800 - RNA, 20 nt, Homo sapiens
  source 1..20: mol_type = other RNA
tctggctgtatggtgacaag

SEQ ID NO: 4801 - RNA, 20 nt, Homo sapiens
  source 1..20: mol_type = other RNA
ggatgtgatttatacctgga

SEQ ID NO: 4802 - RNA, 20 nt, Homo sapiens
  source 1..20: mol_type = other RNA
gcatgtcagattggtcacac

SEQ ID NO: 4803 - RNA, 20 nt, Homo sapiens
  source 1..20: mol_type = other RNA
ggtctgcagagcaataagaa

SEQ ID NO: 4804 - RNA, 20 nt, Homo sapiens
  source 1..20: mol_type = other RNA
tggctgtatggtgacaagag

SEQ ID NO: 4805 - RNA, 20 nt, Homo sapiens
  source 1..20: mol_type = other RNA
gaaccgaccagctctttcac

SEQ ID NO: 4806 - RNA, 20 nt, Homo sapiens
  source 1..20: mol_type = other RNA
tcagggagtagcctccatct

SEQ ID NO: 4807 - RNA, 20 nt, Homo sapiens
  source 1..20: mol_type = other RNA
gtcaaagcctaaagtcacca

SEQ ID NO: 4808 - RNA, 20 nt, Homo sapiens
  source 1..20: mol_type = other RNA
tcaaagcctaaagtcaccat

SEQ ID NO: 4809 - RNA, 20 nt, Homo sapiens
  source 1..20: mol_type = other RNA
gctggtcggttccgttggtg

SEQ ID NO: 4810 - RNA, 20 nt, Homo sapiens
  source 1..20: mol_type = other RNA
cttgtcaccatacagccaga

SEQ ID NO: 4811 - RNA, 20 nt, Homo sapiens
  source 1..20: mol_type = other RNA
gacatgctgcatggaacatg

SEQ ID NO: 4812 - RNA, 20 nt, Homo sapiens
  source 1..20: mol_type = other RNA
ggacccgtgaaagagctggt

SEQ ID NO: 4813 - RNA, 20 nt, Homo sapiens
  source 1..20: mol_type = other RNA
gacatgcagcacgtactcct

SEQ ID NO: 4814 - RNA, 20 nt, Homo sapiens
  source 1..20: mol_type = other RNA
aaagagctggtcggttccgt

SEQ ID NO: 4815 - RNA, 20 nt, Homo sapiens
  source 1..20: mol_type = other RNA
cttgccaggaagctctgtga

SEQ ID NO: 4816 - RNA, 20 nt, Homo sapiens
  source 1..20: mol_type = other RNA
agagtagacttcccagatgg

SEQ ID NO: 4817 - RNA, 20 nt, Homo sapiens
  source 1..20: mol_type = other RNA
tgactcagggatctactatg

SEQ ID NO: 4818 - RNA, 20 nt, Homo sapiens
  source 1..20: mol_type = other RNA
gaaagtcacggccccaccaa

SEQ ID NO: 4819 - RNA, 20 nt, Homo sapiens
  source 1..20: mol_type = other RNA
ggacccattatgggactcat

SEQ ID NO: 4820 - RNA, 20 nt, Homo sapiens
  source 1..20: mol_type = other RNA
atttatacctggaaggccct

SEQ ID NO: 4821 - RNA, 20 nt, Homo sapiens
  source 1..20: mol_type = other RNA
ttccatgcagcatgtcagat

SEQ ID NO: 4822 - RNA, 20 nt, Homo sapiens
  source 1..20: mol_type = other RNA
gttcctggcaacgcagatga

SEQ ID NO: 4823 - RNA, 20 nt, Homo sapiens
  source 1..20: mol_type = other RNA
agtctcgggccaacgccaag

SEQ ID NO: 4824 - RNA, 20 nt, Homo sapiens
  source 1..20: mol_type = other RNA
gtctcgggccaacgccaagg

SEQ ID NO: 4825 - RNA, 20 nt, Homo sapiens
  source 1..20: mol_type = other RNA
aggcgtgcggaatactgaag

SEQ ID NO: 4826 - RNA, 20 nt, Homo sapiens
  source 1..20: mol_type = other RNA
agggatccagccaaagacga

SEQ ID NO: 4827 - RNA, 20 nt, Homo sapiens
  source 1..20: mol_type = other RNA
ctggcgatacatctacccac

SEQ ID NO: 4828 - RNA, 20 nt, Homo sapiens
  source 1..20: mol_type = other RNA
tgggatcaacccagacaacg

SEQ ID NO: 4829 - RNA, 20 nt, Homo sapiens
  source 1..20: mol_type = other RNA
gaatactgaagtggccatca

SEQ ID NO: 4830 - RNA, 20 nt, Homo sapiens
  source 1..20: mol_type = other RNA
acgaagtccagccacaaggg

SEQ ID NO: 4831 - RNA, 20 nt, Homo sapiens
  source 1..20: mol_type = other RNA
cgagtacaacacctcccttg

SEQ ID NO: 4832 - RNA, 20 nt, Homo sapiens
  source 1..20: mol_type = other RNA
acaaagaaagcacacaccag

SEQ ID NO: 4833 - RNA, 20 nt, Homo sapiens
  source 1..20: mol_type = other RNA
tggaaatgaccctggcatca

SEQ ID NO: 4834 - RNA, 20 nt, Homo sapiens
  source 1..20: mol_type = other RNA
cctgctctgtgctagcagcg

SEQ ID NO: 4835 - RNA, 20 nt, Homo sapiens
  source 1..20: mol_type = other RNA
tcaccaggtatgatcatgat

SEQ ID NO: 4836 - RNA, 20 nt, Homo sapiens
  source 1..20: mol_type = other RNA
gacgacgtcagcacagaccg

SEQ ID NO: 4837 - RNA, 20 nt, Homo sapiens
  source 1..20: mol_type = other RNA
cgccaggaagcccaccaccg

SEQ ID NO: 4838 - RNA, 20 nt, Homo sapiens
  source 1..20: mol_type = other RNA
gtgttggacatcgtgcaggt

SEQ ID NO: 4839 - RNA, 20 nt, Homo sapiens
  source 1..20: mol_type = other RNA
tgtgtccatgtgtccaatgt

SEQ ID NO: 4840 - RNA, 20 nt, Homo sapiens
  source 1..20: mol_type = other RNA
ttatgtctctatagtgtggg

SEQ ID NO: 4841 - RNA, 20 nt, Homo sapiens
  source 1..20: mol_type = other RNA
gagtctcgggccaacgccaa

SEQ ID NO: 4842 - RNA, 20 nt, Homo sapiens
  source 1..20: mol_type = other RNA
agagcagcgccaaggtgatg

SEQ ID NO: 4843 - RNA, 20 nt, Homo sapiens
  source 1..20: mol_type = other RNA
cggtcccaaagcctgccagg

SEQ ID NO: 4844 - RNA, 20 nt, Homo sapiens
  source 1..20: mol_type = other RNA
ttgcagcccgatggaaaagg

SEQ ID NO: 4845 - RNA, 20 nt, Homo sapiens
  source 1..20: mol_type = other RNA
caaagaaagcacacaccagt

SEQ ID NO: 4846 - RNA, 20 nt, Homo sapiens
  source 1..20: mol_type = other RNA
cctgctcttcagatggccca

SEQ ID NO: 4847 - RNA, 20 nt, Homo sapiens
  source 1..20: mol_type = other RNA
ctgccttcttacctggatga

SEQ ID NO: 4848 - RNA, 20 nt, Homo sapiens
  source 1..20: mol_type = other RNA
tacccagaaggaaatcagag

SEQ ID NO: 4849 - RNA, 20 nt, Homo sapiens
  source 1..20: mol_type = other RNA
agaccaccaagacaactgtg

SEQ ID NO: 4850 - RNA, 20 nt, Homo sapiens
  source 1..20: mol_type = other RNA
cacacacttcaattactgaa

SEQ ID NO: 4851 - RNA, 20 nt, Homo sapiens
  source 1..20: mol_type = other RNA
caaaagtaaaaatgcctgcg

SEQ ID NO: 4852 - RNA, 20 nt, Homo sapiens
  source 1..20: mol_type = other RNA
cctcggtcctagcaccatcg

SEQ ID NO: 4853 - RNA, 20 nt, Homo sapiens
  source 1..20: mol_type = other RNA
tggtgcctgacggagagaca

SEQ ID NO: 4854 - RNA, 20 nt, Homo sapiens
  source 1..20: mol_type = other RNA
tgaatttactgaaggaactg

SEQ ID NO: 4855 - RNA, 20 nt, Homo sapiens
  source 1..20: mol_type = other RNA
gttccatataaaaccatcga

SEQ ID NO: 4856 - RNA, 20 nt, Homo sapiens
  source 1..20: mol_type = other RNA
ccacgatggtgctaggaccg

SEQ ID NO: 4857 - RNA, 20 nt, Homo sapiens
  source 1..20: mol_type = other RNA
tgtgtttatgtggtgcctga

SEQ ID NO: 4858 - RNA, 20 nt, Homo sapiens
  source 1..20: mol_type = other RNA
tggcagtggagggagatccg

SEQ ID NO: 4859 - RNA, 20 nt, Homo sapiens
  source 1..20: mol_type = other RNA
gtttgttgacttcagaacag

SEQ ID NO: 4860 - RNA, 20 nt, Homo sapiens
  source 1..20: mol_type = other RNA
taagcctggtgatacccaga

SEQ ID NO: 4861 - RNA, 20 nt, Homo sapiens
  source 1..20: mol_type = other RNA
atcatattactgtaagaaag

SEQ ID NO: 4862 - RNA, 20 nt, Homo sapiens
  source 1..20: mol_type = other RNA
tgagagcattggcatcatgg

SEQ ID NO: 4863 - RNA, 20 nt, Homo sapiens
  source 1..20: mol_type = other RNA
tatcagtgtctggagaactg

SEQ ID NO: 4864 - RNA, 20 nt, Homo sapiens
  source 1..20: mol_type = other RNA
actcatgtgagtgagagcat

SEQ ID NO: 4865 - RNA, 20 nt, Homo sapiens
  source 1..20: mol_type = other RNA
gtctacaagaggtatcgagc

SEQ ID NO: 4866 - RNA, 20 nt, Homo sapiens
  source 1..20: mol_type = other RNA
aacttcactgcaggagacct

SEQ ID NO: 4867 - RNA, 20 nt, Homo sapiens
  source 1..20: mol_type = other RNA
tttacaagtatgtctacaag

SEQ ID NO: 4868 - RNA, 20 nt, Homo sapiens
  source 1..20: mol_type = other RNA
ttccatataaaaccatcgaa

SEQ ID NO: 4869 - RNA, 20 nt, Homo sapiens
  source 1..20: mol_type = other RNA
agatgtgatgacttctatag

SEQ ID NO: 4870 - RNA, 20 nt, Homo sapiens
  source 1..20: mol_type = other RNA
caagcgaacacaacacagat

SEQ ID NO: 4871 - RNA, 20 nt, Homo sapiens
  source 1..20: mol_type = other RNA
aagctaggcgagaaatggct

SEQ ID NO: 4872 - RNA, 20 nt, Homo sapiens
  source 1..20: mol_type = other RNA
cagcaaaacaatatcagtca

SEQ ID NO: 4873 - RNA, 20 nt, Homo sapiens
  source 1..20: mol_type = other RNA
cctacatcgacgaccacgtg

SEQ ID NO: 4874 - RNA, 20 nt, Homo sapiens
  source 1..20: mol_type = other RNA
agatacccagacaagcacac

SEQ ID NO: 4875 - RNA, 20 nt, Homo sapiens
  source 1..20: mol_type = other RNA
gagacccaagcccagcaacg

SEQ ID NO: 4876 - RNA, 20 nt, Homo sapiens
  source 1..20: mol_type = other RNA
tttctgtaccaaaatctacg

SEQ ID NO: 4877 - RNA, 20 nt, Homo sapiens
  source 1..20: mol_type = other RNA
acatcgacgaccacgtgcgg

SEQ ID NO: 4878 - RNA, 20 nt, Homo sapiens
  source 1..20: mol_type = other RNA
gttgaacctacgctccaggg

SEQ ID NO: 4879 - RNA, 20 nt, Homo sapiens
  source 1..20: mol_type = other RNA
aggtaacctggacatcactc

SEQ ID NO: 4880 - RNA, 20 nt, Homo sapiens
  source 1..20: mol_type = other RNA
caggttgaacctacgctcca

SEQ ID NO: 4881 - RNA, 20 nt, Homo sapiens
  source 1..20: mol_type = other RNA
gctcctacctatatagagcg

SEQ ID NO: 4882 - RNA, 20 nt, Homo sapiens
  source 1..20: mol_type = other RNA
aggagtccttcctccgcacg

SEQ ID NO: 4883 - RNA, 20 nt, Homo sapiens
  source 1..20: mol_type = other RNA
gtgagctacttcggggcacg

SEQ ID NO: 4884 - RNA, 20 nt, Homo sapiens
  source 1..20: mol_type = other RNA
aagatacccagacaagcaca

SEQ ID NO: 4885 - RNA, 20 nt, Homo sapiens
  source 1..20: mol_type = other RNA
accaggctccgatccagcgg

SEQ ID NO: 4886 - RNA, 20 nt, Homo sapiens
  source 1..20: mol_type = other RNA
tcctgaccaccctggagcgt

SEQ ID NO: 4887 - RNA, 20 nt, Homo sapiens
  source 1..20: mol_type = other RNA
ggacaccaggttgacgagca

SEQ ID NO: 4888 - RNA, 20 nt, Homo sapiens
  source 1..20: mol_type = other RNA
gatgtacttgctgctcattg

SEQ ID NO: 4889 - RNA, 20 nt, Homo sapiens
  source 1..20: mol_type = other RNA
agagcccaggataaacccgc

SEQ ID NO: 4890 - RNA, 20 nt, Homo sapiens
  source 1..20: mol_type = other RNA
tggaaacccaaacatcaaga

SEQ ID NO: 4891 - RNA, 20 nt, Homo sapiens
  source 1..20: mol_type = other RNA
gacccaccagtacaagtacg

SEQ ID NO: 4892 - RNA, 20 nt, Homo sapiens
  source 1..20: mol_type = other RNA
tgagctacttcggggcacgc

SEQ ID NO: 4893 - RNA, 20 nt, Homo sapiens
  source 1..20: mol_type = other RNA
cactgcaatctccatgcagg

SEQ ID NO: 4894 - RNA, 20 nt, Homo sapiens
  source 1..20: mol_type = other RNA
actcctcgctctatataggt

SEQ ID NO: 4895 - RNA, 20 nt, Homo sapiens
  source 1..20: mol_type = other RNA
cctcatctgccgcaaccgga

SEQ ID NO: 4896 - RNA, 20 nt, Homo sapiens
  source 1..20: mol_type = other RNA
cccaggataaacccgcaggc

SEQ ID NO: 4897 - RNA, 20 nt, Homo sapiens
  source 1..20: mol_type = other RNA
gctggggttactgttcccta

SEQ ID NO: 4898 - RNA, 20 nt, Homo sapiens
  source 1..20: mol_type = other RNA
cctgattaatgatgaactag

SEQ ID NO: 4899 - RNA, 20 nt, Homo sapiens
  source 1..20: mol_type = other RNA
tgctggcaccagaacgaatg

SEQ ID NO: 4900 - RNA, 20 nt, Homo sapiens
  source 1..20: mol_type = other RNA
agctcttcagtaacgatgag

SEQ ID NO: 4901 - RNA, 20 nt, Homo sapiens
  source 1..20: mol_type = other RNA
tccgcaactatagtgaacct

SEQ ID NO: 4902 - RNA, 20 nt, Homo sapiens
  source 1..20: mol_type = other RNA
catgttgtaccaaaggatgg

SEQ ID NO: 4903 - RNA, 20 nt, Homo sapiens
  source 1..20: mol_type = other RNA
ttaatgatgaactagtggag

SEQ ID NO: 4904 - RNA, 20 nt, Homo sapiens
  source 1..20: mol_type = other RNA
tcccattacaggctcagtcg

SEQ ID NO: 4905 - RNA, 20 nt, Homo sapiens
  source 1..20: mol_type = other RNA
tgcaaaaccttgcagaacag

SEQ ID NO: 4906 - RNA, 20 nt, Homo sapiens
  source 1..20: mol_type = other RNA
tggtttggtaattgacctcg

SEQ ID NO: 4907 - RNA, 20 nt, Homo sapiens
  source 1..20: mol_type = other RNA
agcagagcgcctgtattggg

SEQ ID NO: 4908 - RNA, 20 nt, Homo sapiens
  source 1..20: mol_type = other RNA
tcgaggtcaattaccaaacc

SEQ ID NO: 4909 - RNA, 20 nt, Homo sapiens
  source 1..20: mol_type = other RNA
tatttgcagctcgtttgtgg

SEQ ID NO: 4910 - RNA, 20 nt, Homo sapiens
  source 1..20: mol_type = other RNA
agaacacgagaccaatggtg

SEQ ID NO: 4911 - RNA, 20 nt, Homo sapiens
  source 1..20: mol_type = other RNA
accataaaagtcttacctcg

SEQ ID NO: 4912 - RNA, 20 nt, Homo sapiens
  source 1..20: mol_type = other RNA
ggtcaattaccaaaccaggc

SEQ ID NO: 4913 - RNA, 20 nt, Homo sapiens
  source 1..20: mol_type = other RNA
cagtaaagtcagaaatgtga

SEQ ID NO: 4914 - RNA, 20 nt, Homo sapiens
  source 1..20: mol_type = other RNA
catcctttggtacaacatgc

SEQ ID NO: 4915 - RNA, 20 nt, Homo sapiens
  source 1..20: mol_type = other RNA
gacgttggagatcaccacaa

SEQ ID NO: 4916 - RNA, 20 nt, Homo sapiens
  source 1..20: mol_type = other RNA
tgtgatagggtcatgttcgt

SEQ ID NO: 4917 - RNA, 20 nt, Homo sapiens
  source 1..20: mol_type = other RNA
gaggtcatgaaaacggatgg

SEQ ID NO: 4918 - RNA, 20 nt, Homo sapiens
  source 1..20: mol_type = other RNA
gatcaccacaacgggcagag

SEQ ID NO: 4919 - RNA, 20 nt, Homo sapiens
  source 1..20: mol_type = other RNA
tcttgctacagcataacata

SEQ ID NO: 4920 - RNA, 20 nt, Homo sapiens
  source 1..20: mol_type = other RNA
tgtaaatgatcatagacatc

SEQ ID NO: 4921 - RNA, 20 nt, Homo sapiens
  source 1..20: mol_type = other RNA
gcagcagcttaaaaagttgg

SEQ ID NO: 4922 - RNA, 20 nt, Homo sapiens
  source 1..20: mol_type = other RNA
ttcctatattgtatagattt

SEQ ID NO: 4923 - RNA, 20 nt, Homo sapiens
  source 1..20: mol_type = other RNA
gacactccatcactgcccga

SEQ ID NO: 4924 - RNA, 20 nt, Homo sapiens
  source 1..20: mol_type = other RNA
ttgaggagcttaccacagtg

SEQ ID NO: 4925 - RNA, 20 nt, Homo sapiens
  source 1..20: mol_type = other RNA
cgccacctgcaaccacactg

SEQ ID NO: 4926 - RNA, 20 nt, Homo sapiens
  source 1..20: mol_type = other RNA
agcgctgtaagcttctgctg

SEQ ID NO: 4927 - RNA, 20 nt, Homo sapiens
  source 1..20: mol_type = other RNA
cctgcaacaagagctgaccg

SEQ ID NO: 4928 - RNA, 20 nt, Homo sapiens
  source 1..20: mol_type = other RNA
tcctgatcatcgtgattctg

SEQ ID NO: 4929 - RNA, 20 nt, Homo sapiens
  source 1..20: mol_type = other RNA
cctgatcatcgtgattctgg

SEQ ID NO: 4930 - RNA, 20 nt, Homo sapiens
  source 1..20: mol_type = other RNA
gcagagtgcccatggaagac

SEQ ID NO: 4931 - RNA, 20 nt, Homo sapiens
  source 1..20: mol_type = other RNA
cagagtgcccatggaagacg

SEQ ID NO: 4932 - RNA, 20 nt, Homo sapiens
  source 1..20: mol_type = other RNA
aagcgctgtaagcttctgct

SEQ ID NO: 4933 - RNA, 20 nt, Homo sapiens
  source 1..20: mol_type = other RNA
cttgatggtgaagataatca

SEQ ID NO: 4934 - RNA, 20 nt, Homo sapiens
  source 1..20: mol_type = other RNA
tgcagagtgcccatggaaga

SEQ ID NO: 4935 - RNA, 20 nt, Homo sapiens
  source 1..20: mol_type = other RNA
ggcccaaggacaaaagaaag

SEQ ID NO: 4936 - RNA, 20 nt, Homo sapiens
  source 1..20: mol_type = other RNA
caccatcaaggccaacagcg

SEQ ID NO: 4937 - RNA, 20 nt, Homo sapiens
  source 1..20: mol_type = other RNA
gcttaccacagtgtggttgc

SEQ ID NO: 4938 - RNA, 20 nt, Homo sapiens
  source 1..20: mol_type = other RNA
gcgcttatccccgtcttcca

SEQ ID NO: 4939 - RNA, 20 nt, Homo sapiens
  source 1..20: mol_type = other RNA
taccacagtgtggttgcagg

SEQ ID NO: 4940 - RNA, 20 nt, Homo sapiens
  source 1..20: mol_type = other RNA
gaagggctttcaggatgtgg

SEQ ID NO: 4941 - RNA, 20 nt, Homo sapiens
  source 1..20: mol_type = other RNA
cttgattatcttcaccatca

SEQ ID NO: 4942 - RNA, 20 nt, Homo sapiens
  source 1..20: mol_type = other RNA
ctgcatccagggaagccatt

SEQ ID NO: 4943 - RNA, 20 nt, Homo sapiens
  source 1..20: mol_type = other RNA
tgcccgaaggccgtcccggc

SEQ ID NO: 4944 - RNA, 20 nt, Homo sapiens
  source 1..20: mol_type = other RNA
ctggatgcagagaaggccca

SEQ ID NO: 4945 - RNA, 20 nt, Homo sapiens
  source 1..20: mol_type = other RNA
cccccagaatcacgatgatc

SEQ ID NO: 4946 - RNA, 20 nt, Homo sapiens
  source 1..20: mol_type = other RNA
gagctgaccgaggcccagaa

SEQ ID NO: 4947 - RNA, 20 nt, Homo sapiens
  source 1..20: mol_type = other RNA
cgcttatccccgtcttccat

SEQ ID NO: 4948 - RNA, 20 nt, Homo sapiens
  source 1..20: mol_type = other RNA
gacacctggatctttcacat

SEQ ID NO: 4949 - RNA, 20 nt, Homo sapiens
  source 1..20: mol_type = other RNA
tatacaagctattagctgcg

SEQ ID NO: 4950 - RNA, 20 nt, Homo sapiens
  source 1..20: mol_type = other RNA
tacccccttgactattgaca

SEQ ID NO: 4951 - RNA, 20 nt, Homo sapiens
  source 1..20: mol_type = other RNA
tttgtcatataaccttctgg

SEQ ID NO: 4952 - RNA, 20 nt, Homo sapiens
  source 1..20: mol_type = other RNA
ctccttgtcaatagtcaagg

SEQ ID NO: 4953 - RNA, 20 nt, Homo sapiens
  source 1..20: mol_type = other RNA
cagaagttcagtgagacacc

SEQ ID NO: 4954 - RNA, 20 nt, Homo sapiens
  source 1..20: mol_type = other RNA
acgagtctttgagacactca

SEQ ID NO: 4955 - RNA, 20 nt, Homo sapiens
  source 1..20: mol_type = other RNA
tggttgtaagagcattgtct

SEQ ID NO: 4956 - RNA, 20 nt, Homo sapiens
  source 1..20: mol_type = other RNA
ggtttgatctccactacagg

SEQ ID NO: 4957 - RNA, 20 nt, Homo sapiens
  source 1..20: mol_type = other RNA
cttgtatagcagagtctcag

SEQ ID NO: 4958 - RNA, 20 nt, Homo sapiens
  source 1..20: mol_type = other RNA
aggtcctcaacaccactgag

SEQ ID NO: 4959 - RNA, 20 nt, Homo sapiens
  source 1..20: mol_type = other RNA
gcctccttgtcaatagtcaa

SEQ ID NO: 4960 - RNA, 20 nt, Homo sapiens
  source 1..20: mol_type = other RNA
aagaagatatcgggtatgct

SEQ ID NO: 4961 - RNA, 20 nt, Homo sapiens
  source 1..20: mol_type = other RNA
cctccttgtcaatagtcaag

SEQ ID NO: 4962 - RNA, 20 nt, Homo sapiens
  source 1..20: mol_type = other RNA
tatgcttggaataaaatgaa

SEQ ID NO: 4963 - RNA, 20 nt, Homo sapiens
  source 1..20: mol_type = other RNA
agcattgtctcggagatcca

SEQ ID NO: 4964 - RNA, 20 nt, Homo sapiens
  source 1..20: mol_type = other RNA
ccccttgactattgacaagg

SEQ ID NO: 4965 - RNA, 20 nt, Homo sapiens
  source 1..20: mol_type = other RNA
tgatatagttgaagctcagc

SEQ ID NO: 4966 - RNA, 20 nt, Homo sapiens
  source 1..20: mol_type = other RNA
caaacccatgtgaaagatcc

SEQ ID NO: 4967 - RNA, 20 nt, Homo sapiens
  source 1..20: mol_type = other RNA
gctggttcctggatatgtcc

SEQ ID NO: 4968 - RNA, 20 nt, Homo sapiens
  source 1..20: mol_type = other RNA
ggcctccttgtcaatagtca

SEQ ID NO: 4969 - RNA, 20 nt, Homo sapiens
  source 1..20: mol_type = other RNA
aaccttagaatcttggacct

SEQ ID NO: 4970 - RNA, 20 nt, Homo sapiens
  source 1..20: mol_type = other RNA
tctgatgctgtattgaaaga

SEQ ID NO: 4971 - RNA, 20 nt, Homo sapiens
  source 1..20: mol_type = other RNA
caatgccatcagcaaaagcc

SEQ ID NO: 4972 - RNA, 20 nt, Homo sapiens
  source 1..20: mol_type = other RNA
tcagtggtgttgaggacctg

SEQ ID NO: 4973 - RNA, 20 nt, Homo sapiens
  source 1..20: mol_type = other RNA
aatggggcattataacaacg

SEQ ID NO: 4974 - RNA, 20 nt, Homo sapiens
  source 1..20: mol_type = other RNA
cagctactagagataccgca

SEQ ID NO: 4975 - RNA, 20 nt, Homo sapiens
  source 1..20: mol_type = other RNA
cagtctgtgaaaggacgctg

SEQ ID NO: 4976 - RNA, 20 nt, Homo sapiens
  source 1..20: mol_type = other RNA
atggggcattataacaacga

SEQ ID NO: 4977 - RNA, 20 nt, Homo sapiens
  source 1..20: mol_type = other RNA
tcagatatgataagtatgca

SEQ ID NO: 4978 - RNA, 20 nt, Homo sapiens
  source 1..20: mol_type = other RNA
gatgttcttaaaccatcttg

SEQ ID NO: 4979 - RNA, 20 nt, Homo sapiens
  source 1..20: mol_type = other RNA
ccagctactagagataccgc

SEQ ID NO: 4980 - RNA, 20 nt, Homo sapiens
  source 1..20: mol_type = other RNA
ctgaaaattctgcggatcag

SEQ ID NO: 4981 - RNA, 20 nt, Homo sapiens
  source 1..20: mol_type = other RNA
acacggcgcacaaggaaatg

SEQ ID NO: 4982 - RNA, 20 nt, Homo sapiens
  source 1..20: mol_type = other RNA
actgtgtacctattccactg

SEQ ID NO: 4983 - RNA, 20 nt, Homo sapiens
  source 1..20: mol_type = other RNA
tgtagaaagttatgaacccc

SEQ ID NO: 4984 - RNA, 20 nt, Homo sapiens
  source 1..20: mol_type = other RNA
cagatggtccagtctgtgaa

SEQ ID NO: 4985 - RNA, 20 nt, Homo sapiens
  source 1..20: mol_type = other RNA
agatggcaaaacagtaggga

SEQ ID NO: 4986 - RNA, 20 nt, Homo sapiens
  source 1..20: mol_type = other RNA
agatccaattggatgaggct

SEQ ID NO: 4987 - RNA, 20 nt, Homo sapiens
  source 1..20: mol_type = other RNA
agcatttacagggatctgta

SEQ ID NO: 4988 - RNA, 20 nt, Homo sapiens
  source 1..20: mol_type = other RNA
aacatagaaatactctacct

SEQ ID NO: 4989 - RNA, 20 nt, Homo sapiens
  source 1..20: mol_type = other RNA
aattgaaagacagatccaat

SEQ ID NO: 4990 - RNA, 20 nt, Homo sapiens
  source 1..20: mol_type = other RNA
aagacagatccaattggatg

SEQ ID NO: 4991 - RNA, 20 nt, Homo sapiens
  source 1..20: mol_type = other RNA
aggctgagaagctgtaagct

SEQ ID NO: 4992 - RNA, 20 nt, Homo sapiens
  source 1..20: mol_type = other RNA
gcgcatcaaaagcatttaca

SEQ ID NO: 4993 - RNA, 20 nt, Homo sapiens
  source 1..20: mol_type = other RNA
ttgaatggagtaaatcaagc

SEQ ID NO: 4994 - RNA, 20 nt, Homo sapiens
  source 1..20: mol_type = other RNA
ataccatcaaaaactccaga

SEQ ID NO: 4995 - RNA, 20 nt, Homo sapiens
  source 1..20: mol_type = other RNA
taagaacatcaacaaactcc

SEQ ID NO: 4996 - RNA, 20 nt, Homo sapiens
  source 1..20: mol_type = other RNA
ttcctccaccagcaggacca

SEQ ID NO: 4997 - RNA, 20 nt, Homo sapiens
  source 1..20: mol_type = other RNA
taactttgtcaagtttagga

SEQ ID NO: 4998 - RNA, 20 nt, Homo sapiens
  source 1..20: mol_type = other RNA
gcccacatcgagcacacgca

SEQ ID NO: 4999 - RNA, 20 nt, Homo sapiens
  source 1..20: mol_type = other RNA
cactcgatgagaccacgctc

SEQ ID NO: 5000 - RNA, 20 nt, Homo sapiens
  source 1..20: mol_type = other RNA
aggctggtgacattgccacg

SEQ ID NO: 5001 - RNA, 20 nt, Homo sapiens
  source 1..20: mol_type = other RNA
catcgtcaaactggcgcctg

SEQ ID NO: 5002 - RNA, 20 nt, Homo sapiens
  source 1..20: mol_type = other RNA
cacatcgagcacacgcaggg

SEQ ID NO: 5003 - RNA, 20 nt, Homo sapiens
  source 1..20: mol_type = other RNA
ctgggccatatgtgggccga

SEQ ID NO: 5004 - RNA, 20 nt, Homo sapiens
  source 1..20: mol_type = other RNA
ttctccatggcagcaccccg

SEQ ID NO: 5005 - RNA, 20 nt, Homo sapiens
  source 1..20: mol_type = other RNA
ggatctgtcacggaacaacc

SEQ ID NO: 5006 - RNA, 20 nt, Homo sapiens
  source 1..20: mol_type = other RNA
cacggagctaccgcgactgg

SEQ ID NO: 5007 - RNA, 20 nt, Homo sapiens
  source 1..20: mol_type = other RNA
ctgtcggacaaccgcatcag

SEQ ID NO: 5008 - RNA, 20 nt, Homo sapiens
  source 1..20: mol_type = other RNA
tgttgtacttgagtgacagg

SEQ ID NO: 5009 - RNA, 20 nt, Homo sapiens
  source 1..20: mol_type = other RNA
cctcaagtggaactgcccgc

SEQ ID NO: 5010 - RNA, 20 nt, Homo sapiens
  source 1..20: mol_type = other RNA
aggtatcgggatgtagctgg

SEQ ID NO: 5011 - RNA, 20 nt, Homo sapiens
  source 1..20: mol_type = other RNA
atggggctgaggccaaccgg

SEQ ID NO: 5012 - RNA, 20 nt, Homo sapiens
  source 1..20: mol_type = other RNA
cctgcgctacgtggacctgt

SEQ ID NO: 5013 - RNA, 20 nt, Homo sapiens
  source 1..20: mol_type = other RNA
gttgtacttgagtgacaggt

SEQ ID NO: 5014 - RNA, 20 nt, Homo sapiens
  source 1..20: mol_type = other RNA
gttgttccgtgacagatcca

SEQ ID NO: 5015 - RNA, 20 nt, Homo sapiens
  source 1..20: mol_type = other RNA
caagtacaacaacctcactg

SEQ ID NO: 5016 - RNA, 20 nt, Homo sapiens
  source 1..20: mol_type = other RNA
aggacaacagcagatactcc

SEQ ID NO: 5017 - RNA, 20 nt, Homo sapiens
  source 1..20: mol_type = other RNA
gctccgtgaatgagtgctcg

SEQ ID NO: 5018 - RNA, 20 nt, Homo sapiens
  source 1..20: mol_type = other RNA
ctgcgcttcctattcatgga

SEQ ID NO: 5019 - RNA, 20 nt, Homo sapiens
  source 1..20: mol_type = other RNA
ggcaaacatctccggctgca

SEQ ID NO: 5020 - RNA, 20 nt, Homo sapiens
  source 1..20: mol_type = other RNA
tgaatgccagttggttccgt

SEQ ID NO: 5021 - RNA, 20 nt, Homo sapiens
  source 1..20: mol_type = other RNA
acctggccttctttaagtgg

SEQ ID NO: 5022 - RNA, 20 nt, Homo sapiens
  source 1..20: mol_type = other RNA
cagggtgggcacagccaaga

SEQ ID NO: 5023 - RNA, 20 nt, Homo sapiens
  source 1..20: mol_type = other RNA
atcacagacgataccctggg

SEQ ID NO: 5024 - RNA, 20 nt, Homo sapiens
  source 1..20: mol_type = other RNA
gcactctcaccattacgctg

SEQ ID NO: 5025 - RNA, 20 nt, Homo sapiens
  source 1..20: mol_type = other RNA
agccatcacagacgataccc

SEQ ID NO: 5026 - RNA, 20 nt, Homo sapiens
  source 1..20: mol_type = other RNA
tggtagagacccgcatcatg

SEQ ID NO: 5027 - RNA, 20 nt, Homo sapiens
  source 1..20: mol_type = other RNA
cacaacaccacagtgttcca

SEQ ID NO: 5028 - RNA, 20 nt, Homo sapiens
  source 1..20: mol_type = other RNA
gccatcacagacgataccct

SEQ ID NO: 5029 - RNA, 20 nt, Homo sapiens
  source 1..20: mol_type = other RNA
ttgtagattccgcagcgtaa

SEQ ID NO: 5030 - RNA, 20 nt, Homo sapiens
  source 1..20: mol_type = other RNA
acccagggtatcgtctgtga

SEQ ID NO: 5031 - RNA, 20 nt, Homo sapiens
  source 1..20: mol_type = other RNA
tggagatctctggttccccg

SEQ ID NO: 5032 - RNA, 20 nt, Homo sapiens
  source 1..20: mol_type = other RNA
tatgactccatgaagcactg

SEQ ID NO: 5033 - RNA, 20 nt, Homo sapiens
  source 1..20: mol_type = other RNA
tggtcagcacgcacaacttg

SEQ ID NO: 5034 - RNA, 20 nt, Homo sapiens
  source 1..20: mol_type = other RNA
gaatctacaaccccatgatg

SEQ ID NO: 5035 - RNA, 20 nt, Homo sapiens
  source 1..20: mol_type = other RNA
aatggtgagagtgccaccca

SEQ ID NO: 5036 - RNA, 20 nt, Homo sapiens
  source 1..20: mol_type = other RNA
tgtgcgtgctgaccacacgc

SEQ ID NO: 5037 - RNA, 20 nt, Homo sapiens
  source 1..20: mol_type = other RNA
tgaggctgacaccctcagga

SEQ ID NO: 5038 - RNA, 20 nt, Homo sapiens
  source 1..20: mol_type = other RNA
gaagggcccatgccagcgtg

SEQ ID NO: 5039 - RNA, 20 nt, Homo sapiens
  source 1..20: mol_type = other RNA
atgactccatgaagcactgg

SEQ ID NO: 5040 - RNA, 20 nt, Homo sapiens
  source 1..20: mol_type = other RNA
tcttactctttgtcacaggt

SEQ ID NO: 5041 - RNA, 20 nt, Homo sapiens
  source 1..20: mol_type = other RNA
cgaagctctcagactccccg

SEQ ID NO: 5042 - RNA, 20 nt, Homo sapiens
  source 1..20: mol_type = other RNA
tgctgaccacacgctggcat

SEQ ID NO: 5043 - RNA, 20 nt, Homo sapiens
  source 1..20: mol_type = other RNA
ataggggcaagacacctgca

SEQ ID NO: 5044 - RNA, 20 nt, Homo sapiens
  source 1..20: mol_type = other RNA
cgccacgccctggaacactg

SEQ ID NO: 5045 - RNA, 20 nt, Homo sapiens
  source 1..20: mol_type = other RNA
cccattccacctcctcagga

SEQ ID NO: 5046 - RNA, 20 nt, Homo sapiens
  source 1..20: mol_type = other RNA
tgccgccagctgggagagaa

SEQ ID NO: 5047 - RNA, 20 nt, Homo sapiens
  source 1..20: mol_type = other RNA
ctcatcttactctttgtcac

SEQ ID NO: 5048 - RNA, 20 nt, Homo sapiens
  source 1..20: mol_type = other RNA
gtcccctccagactcgcaca

SEQ ID NO: 5049 - RNA, 20 nt, Homo sapiens
  source 1..20: mol_type = other RNA
agcttgtctaccacacgcgg

SEQ ID NO: 5050 - RNA, 20 nt, Homo sapiens
  source 1..20: mol_type = other RNA
gagagcttgtctaccacacg

SEQ ID NO: 5051 - RNA, 20 nt, Homo sapiens
  source 1..20: mol_type = other RNA
cttccccggagccacacaca

SEQ ID NO: 5052 - RNA, 20 nt, Homo sapiens
  source 1..20: mol_type = other RNA
tctggatggtgccttctgtg

SEQ ID NO: 5053 - RNA, 20 nt, Homo sapiens
  source 1..20: mol_type = other RNA
ggatagcatcactgcgctga

SEQ ID NO: 5054 - RNA, 20 nt, Homo sapiens
  source 1..20: mol_type = other RNA
tcagccgtgtgcgagtctgg

SEQ ID NO: 5055 - RNA, 20 nt, Homo sapiens
  source 1..20: mol_type = other RNA
ggagcagggggaagtcgtag

SEQ ID NO: 5056 - RNA, 20 nt, Homo sapiens
  source 1..20: mol_type = other RNA
agccgtgtgcgagtctggag

SEQ ID NO: 5057 - RNA, 20 nt, Homo sapiens
  source 1..20: mol_type = other RNA
agtgatgctatccacacaga

SEQ ID NO: 5058 - RNA, 20 nt, Homo sapiens
  source 1..20: mol_type = other RNA
gaaggcaccatccagagcac

SEQ ID NO: 5059 - RNA, 20 nt, Homo sapiens
  source 1..20: mol_type = other RNA
ttgtctaccacacgcggtgg

SEQ ID NO: 5060 - RNA, 20 nt, Homo sapiens
  source 1..20: mol_type = other RNA
ccagactcgcacacggctga

SEQ ID NO: 5061 - RNA, 20 nt, Homo sapiens
  source 1..20: mol_type = other RNA
cctgcagccagcgagatcac

SEQ ID NO: 5062 - RNA, 20 nt, Homo sapiens
  source 1..20: mol_type = other RNA
tccttgggccgtgttctgag

SEQ ID NO: 5063 - RNA, 20 nt, Homo sapiens
  source 1..20: mol_type = other RNA
tggtgcctggtggcacacaa

SEQ ID NO: 5064 - RNA, 20 nt, Homo sapiens
  source 1..20: mol_type = other RNA
ggtcaccattgtgtgccacc

SEQ ID NO: 5065 - RNA, 20 nt, Homo sapiens
  source 1..20: mol_type = other RNA
agttcctccaccaccgcgtg

SEQ ID NO: 5066 - RNA, 20 nt, Homo sapiens
  source 1..20: mol_type = other RNA
ccttccccggagccacacac

SEQ ID NO: 5067 - RNA, 20 nt, Homo sapiens
  source 1..20: mol_type = other RNA
ttgtgtgccaccaggcacca

SEQ ID NO: 5068 - RNA, 20 nt, Homo sapiens
  source 1..20: mol_type = other RNA
tctaccacacgcggtggtgg

SEQ ID NO: 5069 - RNA, 20 nt, Homo sapiens
  source 1..20: mol_type = other RNA
gcaagcagcccctcagaaca

SEQ ID NO: 5070 - RNA, 20 nt, Homo sapiens
  source 1..20: mol_type = other RNA
ggcgagtgtagatgctgcct

SEQ ID NO: 5071 - RNA, 20 nt, Homo sapiens
  source 1..20: mol_type = other RNA
caggaaggctaggagcaggt

SEQ ID NO: 5072 - RNA, 20 nt, Homo sapiens
  source 1..20: mol_type = other RNA
cacatctgtggacagccagc

SEQ ID NO: 5073 - RNA, 20 nt, Homo sapiens
  source 1..20: mol_type = other RNA
aagaagtccatgctagacaa

SEQ ID NO: 5074 - RNA, 20 nt, Homo sapiens
  source 1..20: mol_type = other RNA
tttcgagctcctgatctgaa

SEQ ID NO: 5075 - RNA, 20 nt, Homo sapiens
  source 1..20: mol_type = other RNA
aggtcaagttgagcccagag

SEQ ID NO: 5076 - RNA, 20 nt, Homo sapiens
  source 1..20: mol_type = other RNA
ggtaactgatccggcacaca

SEQ ID NO: 5077 - RNA, 20 nt, Homo sapiens
  source 1..20: mol_type = other RNA
gttgatcattgtgcacgcca

SEQ ID NO: 5078 - RNA, 20 nt, Homo sapiens
  source 1..20: mol_type = other RNA
taggccgtatgttctcaggc

SEQ ID NO: 5079 - RNA, 20 nt, Homo sapiens
  source 1..20: mol_type = other RNA
tcaccacacgttcctcacag

SEQ ID NO: 5080 - RNA, 20 nt, Homo sapiens
  source 1..20: mol_type = other RNA
ccacacgttcctcacagagg

SEQ ID NO: 5081 - RNA, 20 nt, Homo sapiens
  source 1..20: mol_type = other RNA
ctcaaaatctgccaagacgt

SEQ ID NO: 5082 - RNA, 20 nt, Homo sapiens
  source 1..20: mol_type = other RNA
ggaggtcaagttgagcccag

SEQ ID NO: 5083 - RNA, 20 nt, Homo sapiens
  source 1..20: mol_type = other RNA
tatgacgccatccacaccct

SEQ ID NO: 5084 - RNA, 20 nt, Homo sapiens
  source 1..20: mol_type = other RNA
gaggtcaagttgagcccaga

SEQ ID NO: 5085 - RNA, 20 nt, Homo sapiens
  source 1..20: mol_type = other RNA
gtctcttacttggtactccc

SEQ ID NO: 5086 - RNA, 20 nt, Homo sapiens
  source 1..20: mol_type = other RNA
tcggcatgtagccaacatag

SEQ ID NO: 5087 - RNA, 20 nt, Homo sapiens
  source 1..20: mol_type = other RNA
caacccctgagcctggactg

SEQ ID NO: 5088 - RNA, 20 nt, Homo sapiens
  source 1..20: mol_type = other RNA
atctgagatgagctctctca

SEQ ID NO: 5089 - RNA, 20 nt, Homo sapiens
  source 1..20: mol_type = other RNA
gtatgacaaaaccaacgtct

SEQ ID NO: 5090 - RNA, 20 nt, Homo sapiens
  source 1..20: mol_type = other RNA
tgtccgacgctactggggta

SEQ ID NO: 5091 - RNA, 20 nt, Homo sapiens
  source 1..20: mol_type = other RNA
catagtggagaagctcaggg

SEQ ID NO: 5092 - RNA, 20 nt, Homo sapiens
  source 1..20: mol_type = other RNA
cccgggcaacctcctctgtg

SEQ ID NO: 5093 - RNA, 20 nt, Homo sapiens
  source 1..20: mol_type = other RNA
ggtttgcagtgaggcatgct

SEQ ID NO: 5094 - RNA, 20 nt, Homo sapiens
  source 1..20: mol_type = other RNA
atgttggctacatgccgatt

SEQ ID NO: 5095 - RNA, 20 nt, Homo sapiens
  source 1..20: mol_type = other RNA
tggtaactgatccggcacac

SEQ ID NO: 5096 - RNA, 20 nt, Homo sapiens
  source 1..20: mol_type = other RNA
tacgaactctgaaactgaga

SEQ ID NO: 5097 - RNA, 20 nt, Homo sapiens
  source 1..20: mol_type = other RNA
acagcacatgaaatgttgtt

SEQ ID NO: 5098 - RNA, 20 nt, Homo sapiens
  source 1..20: mol_type = other RNA
ggaaaaactaccaagactcg

SEQ ID NO: 5099 - RNA, 20 nt, Homo sapiens
  source 1..20: mol_type = other RNA
accaggtctacacattcgat

SEQ ID NO: 5100 - RNA, 20 nt, Homo sapiens
  source 1..20: mol_type = other RNA
aacatgaaaatcgacatatg

SEQ ID NO: 5101 - RNA, 20 nt, Homo sapiens
  source 1..20: mol_type = other RNA
tacacattcgataggcatgc

SEQ ID NO: 5102 - RNA, 20 nt, Homo sapiens
  source 1..20: mol_type = other RNA
taccaagactcgaggaccaa

SEQ ID NO: 5103 - RNA, 20 nt, Homo sapiens
  source 1..20: mol_type = other RNA
tcctgaaaggaaggtctgaa

SEQ ID NO: 5104 - RNA, 20 nt, Homo sapiens
  source 1..20: mol_type = other RNA
ggaacaaaggtataatccag

SEQ ID NO: 5105 - RNA, 20 nt, Homo sapiens
  source 1..20: mol_type = other RNA
ccaacaaaatatcaaatccc

SEQ ID NO: 5106 - RNA, 20 nt, Homo sapiens
  source 1..20: mol_type = other RNA
tttacagaatgatcaagtct

SEQ ID NO: 5107 - RNA, 20 nt, Homo sapiens
  source 1..20: mol_type = other RNA
tttatagtgaaaccagctaa

SEQ ID NO: 5108 - RNA, 20 nt, Homo sapiens
  source 1..20: mol_type = other RNA
cttggccaaacaaaaagctg

SEQ ID NO: 5109 - RNA, 20 nt, Homo sapiens
  source 1..20: mol_type = other RNA
ctaatggtgcaatgggtcat

SEQ ID NO: 5110 - RNA, 20 nt, Homo sapiens
  source 1..20: mol_type = other RNA
gagctgcaaaattatcaggt

SEQ ID NO: 5111 - RNA, 20 nt, Homo sapiens
  source 1..20: mol_type = other RNA
tggtgcaatgggtcatgggt

SEQ ID NO: 5112 - RNA, 20 nt, Homo sapiens
  source 1..20: mol_type = other RNA
aaaccagctaatggtgcaat

SEQ ID NO: 5113 - RNA, 20 nt, Homo sapiens
  source 1..20: mol_type = other RNA
ttgtaaccttccattaggaa

SEQ ID NO: 5114 - RNA, 20 nt, Homo sapiens
  source 1..20: mol_type = other RNA
gcaggaaagatccaagttcg

SEQ ID NO: 5115 - RNA, 20 nt, Homo sapiens
  source 1..20: mol_type = other RNA
ccattcgcacaagcccatca

SEQ ID NO: 5116 - RNA, 20 nt, Homo sapiens
  source 1..20: mol_type = other RNA
catgatgggcttgtgcgaat

SEQ ID NO: 5117 - RNA, 20 nt, Homo sapiens
  source 1..20: mol_type = other RNA
accaaattggactcattagg

SEQ ID NO: 5118 - RNA, 20 nt, Homo sapiens
  source 1..20: mol_type = other RNA
tgtcagatgcatgtataact

SEQ ID NO: 5119 - RNA, 20 nt, Homo sapiens
  source 1..20: mol_type = other RNA
ggaacagcagagacaccagt

SEQ ID NO: 5120 - RNA, 20 nt, Homo sapiens
  source 1..20: mol_type = other RNA
gcctatcgaatgtgtagacc

SEQ ID NO: 5121 - RNA, 20 nt, Homo sapiens
  source 1..20: mol_type = other RNA
gaaaccagctaatggtgcaa

SEQ ID NO: 5122 - RNA, 20 nt, Homo sapiens
  source 1..20: mol_type = other RNA
ggacaaagtttgaaattggt

SEQ ID NO: 5123 - RNA, 20 nt, Homo sapiens
  source 1..20: mol_type = other RNA
gtgctggcagggatcgtgat

SEQ ID NO: 5124 - RNA, 20 nt, Homo sapiens
  source 1..20: mol_type = other RNA
ctggacaggacggagacctg

SEQ ID NO: 5125 - RNA, 20 nt, Homo sapiens
  source 1..20: mol_type = other RNA
tgcagattgcagttgctcta

SEQ ID NO: 5126 - RNA, 20 nt, Homo sapiens
  source 1..20: mol_type = other RNA
actcaccacttacagccagc

SEQ ID NO: 5127 - RNA, 20 nt, Homo sapiens
  source 1..20: mol_type = other RNA
agggatcgtgatgggagacc

SEQ ID NO: 5128 - RNA, 20 nt, Homo sapiens
  source 1..20: mol_type = other RNA
gggtctaggcctaccgctct

SEQ ID NO: 5129 - RNA, 20 nt, Homo sapiens
  source 1..20: mol_type = other RNA
ggggacttgaaccctgcagc

SEQ ID NO: 5130 - RNA, 20 nt, Homo sapiens
  source 1..20: mol_type = other RNA
tgggccggctggtccctcgg

SEQ ID NO: 5131 - RNA, 20 nt, Homo sapiens
  source 1..20: mol_type = other RNA
ctgggccggctggtccctcg

SEQ ID NO: 5132 - RNA, 20 nt, Homo sapiens
  source 1..20: mol_type = other RNA
gcccaggaagtacacggcca

SEQ ID NO: 5133 - RNA, 20 nt, Homo sapiens
  source 1..20: mol_type = other RNA
agttgctctacggtgagccc

SEQ ID NO: 5134 - RNA, 20 nt, Homo sapiens
  source 1..20: mol_type = other RNA
cgtgctggcagggatcgtga

SEQ ID NO: 5135 - RNA, 20 nt, synthetic construct
  source 1..20: mol_type = other RNA
tgagcccgggcgtgctggca

SEQ ID NO: 5136 - RNA, 20 nt, synthetic construct
  source 1..20: mol_type = other RNA
aggcccaggcccagagcggt

SEQ ID NO: 5137 - RNA, 20 nt, synthetic construct
  source 1..20: mol_type = other RNA
cagttgctctacggtgagcc

SEQ ID NO: 5138 - RNA, 20 nt, synthetic construct
  source 1..20: mol_type = other RNA
ccacttacagccagcaggag

SEQ ID NO: 5139 - RNA, 20 nt, synthetic construct
  source 1..20: mol_type = other RNA
acgatccctgccagcacgcc

SEQ ID NO: 5140 - RNA, 20 nt, synthetic construct
  source 1..20: mol_type = other RNA
caatgagcactgtcagcacc

SEQ ID NO: 5141 - RNA, 20 nt, synthetic construct
  source 1..20: mol_type = other RNA
aggagcaggagcctgctgca

SEQ ID NO: 5142 - RNA, 20 nt, synthetic construct
  source 1..20: mol_type = other RNA
cgatccctgccagcacgccc

SEQ ID NO: 5143 - RNA, 20 nt, synthetic construct
  source 1..20: mol_type = other RNA
ggcccaggaagtacacggcc

SEQ ID NO: 5144 - RNA, 20 nt, synthetic construct
  source 1..20: mol_type = other RNA
gctgacagtgctcattgccc

SEQ ID NO: 5145 - RNA, 20 nt, synthetic construct
  source 1..20: mol_type = other RNA
tgggtctaggcctaccgctc

SEQ ID NO: 5146 - RNA, 20 nt, synthetic construct
  source 1..20: mol_type = other RNA
cagccggcccaggaagtaca

SEQ ID NO: 5147 - RNA, 20 nt, synthetic construct
  source 1..20: mol_type = other RNA
aggcctaccgctctgggcct

SEQ ID NO: 5148 - RNA, 20 nt, synthetic construct
  source 1..20: mol_type = other RNA
accttcttgctgtataacca

SEQ ID NO: 5149 - RNA, 20 nt, synthetic construct
  source 1..20: mol_type = other RNA
tgcagcaagataccgagatg

SEQ ID NO: 5150 - RNA, 20 nt, synthetic construct
  source 1..20: mol_type = other RNA
atgactcatgaccgaaatga

SEQ ID NO: 5151 - RNA, 20 nt, synthetic construct
  source 1..20: mol_type = other RNA
gcaagataccgagatgaggt

SEQ ID NO: 5152 - RNA, 20 nt, synthetic construct
  source 1..20: mol_type = other RNA
agaacattccatattacctg

SEQ ID NO: 5153 - RNA, 20 nt, synthetic construct
  source 1..20: mol_type = other RNA
taattctgtaggcgtgcatg

SEQ ID NO: 5154 - RNA, 20 nt, synthetic construct
  source 1..20: mol_type = other RNA
aatcttcacaaatttgtgct

SEQ ID NO: 5155 - RNA, 20 nt, synthetic construct
  source 1..20: mol_type = other RNA
gaggttaagaacagatgctg

SEQ ID NO: 5156 - RNA, 20 nt, synthetic construct
  source 1..20: mol_type = other RNA
aatttagatacccaccctcc

SEQ ID NO: 5157 - RNA, 20 nt, synthetic construct
  source 1..20: mol_type = other RNA
acactcttggcttacctccg

SEQ ID NO: 5158 - RNA, 20 nt, synthetic construct
  source 1..20: mol_type = other RNA
gccaagagtgttcggcacat

SEQ ID NO: 5159 - RNA, 20 nt, synthetic construct
  source 1..20: mol_type = other RNA
ttaagactgatgcagccggg

SEQ ID NO: 5160 - RNA, 20 nt, synthetic construct
  source 1..20: mol_type = other RNA
ttacctccgaggatcacaga

SEQ ID NO: 5161 - RNA, 20 nt, synthetic construct
  source 1..20: mol_type = other RNA
tggtgactggcttattgctc

SEQ ID NO: 5162 - RNA, 20 nt, synthetic construct
  source 1..20: mol_type = other RNA
ttaccttattgcatatgtag

SEQ ID NO: 5163 - RNA, 20 nt, synthetic construct
  source 1..20: mol_type = other RNA
agagaccacccacctcatct

SEQ ID NO: 5164 - RNA, 20 nt, synthetic construct
  source 1..20: mol_type = other RNA
agcaagataccgagatgagg

SEQ ID NO: 5165 - RNA, 20 nt, synthetic construct
  source 1..20: mol_type = other RNA
ccttcttgctgtataaccaa

SEQ ID NO: 5166 - RNA, 20 nt, synthetic construct
  source 1..20: mol_type = other RNA
agatgtcatggaaatccgaa

SEQ ID NO: 5167 - RNA, 20 nt, synthetic construct
  source 1..20: mol_type = other RNA
atgtagaggctgtgatcatg

SEQ ID NO: 5168 - RNA, 20 nt, synthetic construct
  source 1..20: mol_type = other RNA
aaagactttacaggtatatc

SEQ ID NO: 5169 - RNA, 20 nt, synthetic construct
  source 1..20: mol_type = other RNA
ctacctccaccagatgttgg

SEQ ID NO: 5170 - RNA, 20 nt, synthetic construct
  source 1..20: mol_type = other RNA
tacttacccccaacatctgg

SEQ ID NO: 5171 - RNA, 20 nt, synthetic construct
  source 1..20: mol_type = other RNA
actacctccaccagatgttg

SEQ ID NO: 5172 - RNA, 20 nt, synthetic construct
  source 1..20: mol_type = other RNA
tcatccatttaccctcacaa

SEQ ID NO: 5173 - RNA, 20 nt, synthetic construct
  source 1..20: mol_type = other RNA
acaggctcgcccctagacaa

SEQ ID NO: 5174 - RNA, 20 nt, synthetic construct
  source 1..20: mol_type = other RNA
gcgccggcccctttgtctag

SEQ ID NO: 5175 - RNA, 20 nt, synthetic construct
  source 1..20: mol_type = other RNA
agagctgacccggtgcgggt

SEQ ID NO: 5176 - RNA, 20 nt, synthetic construct
  source 1..20: mol_type = other RNA
ccctgactcccacccgcacc

SEQ ID NO: 5177 - RNA, 20 nt, synthetic construct
  source 1..20: mol_type = other RNA
caggctcgcccctagacaaa

SEQ ID NO: 5178 - RNA, 20 nt, synthetic construct
  source 1..20: mol_type = other RNA
gggcagagctgacccggtgc

SEQ ID NO: 5179 - RNA, 20 nt, synthetic construct
  source 1..20: mol_type = other RNA
ggagcagactggtgcagcct

SEQ ID NO: 5180 - RNA, 20 nt, synthetic construct
  source 1..20: mol_type = other RNA
tctgggtagcagaccccgcc

SEQ ID NO: 5181 - RNA, 20 nt, synthetic construct
  source 1..20: mol_type = other RNA
ggggtctgctacccagagcc

SEQ ID NO: 5182 - RNA, 20 nt, synthetic construct
  source 1..20: mol_type = other RNA
gggcgtctgggcagctgagt

SEQ ID NO: 5183 - RNA, 20 nt, synthetic construct
  source 1..20: mol_type = other RNA
cgcgccggcccctttgtcta

SEQ ID NO: 5184 - RNA, 20 nt, synthetic construct
  source 1..20: mol_type = other RNA
tcgcccctagacaaaggggc

SEQ ID NO: 5185 - RNA, 20 nt, synthetic construct
  source 1..20: mol_type = other RNA
tgggcgtctgggcagctgag

SEQ ID NO: 5186 - RNA, 20 nt, synthetic construct
  source 1..20: mol_type = other RNA
gccctgactcccacccgcac

SEQ ID NO: 5187 - RNA, 20 nt, synthetic construct
  source 1..20: mol_type = other RNA
cagagctgacccggtgcggg

SEQ ID NO: 5188 - RNA, 20 nt, synthetic construct
  source 1..20: mol_type = other RNA
cggagcagactggtgcagcc

SEQ ID NO: 5189 - RNA, 20 nt, synthetic construct
  source 1..20: mol_type = other RNA
cgcccagcgctctgagcgcg

SEQ ID NO: 5190 - RNA, 20 nt, synthetic construct
  source 1..20: mol_type = other RNA
tgggcagagctgacccggtg

SEQ ID NO: 5191 - RNA, 20 nt, synthetic construct
  source 1..20: mol_type = other RNA
gctcagagcgctgggcgtct

SEQ ID NO: 5192 - RNA, 20 nt, synthetic construct
  source 1..20: mol_type = other RNA
cccggtgcgggtgggagtca

SEQ ID NO: 5193 - RNA, 20 nt, synthetic construct
  source 1..20: mol_type = other RNA
ctgagtgggcagagctgacc

SEQ ID NO: 5194 - RNA, 20 nt, synthetic construct
  source 1..20: mol_type = other RNA
ggccgcgcgctcagagcgct

SEQ ID NO: 5195 - RNA, 20 nt, synthetic construct
  source 1..20: mol_type = other RNA
acccggtgcgggtgggagtc

SEQ ID NO: 5196 - RNA, 20 nt, synthetic construct
  source 1..20: mol_type = other RNA
gcgctctgagcgcgcggccc

SEQ ID NO: 5197 - RNA, 20 nt, synthetic construct
  source 1..20: mol_type = other RNA
gggccgcgcgctcagagcgc

SEQ ID NO: 5198 - RNA, 20 nt, synthetic construct
  source 1..20: mol_type = other RNA
gaccctcggtcctcgctcag

SEQ ID NO: 5199 - RNA, 20 nt, synthetic construct
  source 1..20: mol_type = other RNA
gggcagcggttacagttgtg

SEQ ID NO: 5200 - RNA, 20 nt, synthetic construct
  source 1..20: mol_type = other RNA
ctgtgcccgccggaccgaga

SEQ ID NO: 5201 - RNA, 20 nt, synthetic construct
  source 1..20: mol_type = other RNA
gaatgaatcaaaatcactgc

SEQ ID NO: 5202 - RNA, 20 nt, synthetic construct
  source 1..20: mol_type = other RNA
ggccgctgagcgaggaccga

SEQ ID NO: 5203 - RNA, 20 nt, synthetic construct
  source 1..20: mol_type = other RNA
cacaactgtaaccgctgccc

SEQ ID NO: 5204 - RNA, 20 nt, synthetic construct
  source 1..20: mol_type = other RNA
gggccgctgagcgaggaccg

SEQ ID NO: 5205 - RNA, 20 nt, synthetic construct
  source 1..20: mol_type = other RNA
tccactcagtctttgaccct

SEQ ID NO: 5206 - RNA, 20 nt, synthetic construct
  source 1..20: mol_type = other RNA
ccgcccgctccttctcggtc

SEQ ID NO: 5207 - RNA, 20 nt, synthetic construct
  source 1..20: mol_type = other RNA
cccgccggaccgagaaggag

SEQ ID NO: 5208 - RNA, 20 nt, synthetic construct
  source 1..20: mol_type = other RNA
cccgctccttctcggtccgg

SEQ ID NO: 5209 - RNA, 20 nt, synthetic construct
  source 1..20: mol_type = other RNA
tcggtcctcgctcagcggcc

SEQ ID NO: 5210 - RNA, 20 nt, synthetic construct
  source 1..20: mol_type = other RNA
ccggaccgagaaggagcggg

SEQ ID NO: 5211 - RNA, 20 nt, synthetic construct
  source 1..20: mol_type = other RNA
ttacagttgtgcggcctgcc

SEQ ID NO: 5212 - RNA, 20 nt, synthetic construct
  source 1..20: mol_type = other RNA
ccgccggaccgagaaggagc

SEQ ID NO: 5213 - RNA, 20 nt, synthetic construct
  source 1..20: mol_type = other RNA
gttacagttgtgcggcctgc

SEQ ID NO: 5214 - RNA, 20 nt, synthetic construct
  source 1..20: mol_type = other RNA
ccgctccttctcggtccggc

SEQ ID NO: 5215 - RNA, 20 nt, synthetic construct
  source 1..20: mol_type = other RNA
gcgctgcgctctgtgcccgc

SEQ ID NO: 5216 - RNA, 20 nt, synthetic construct
  source 1..20: mol_type = other RNA
gcctgccgggccgctgagcg

SEQ ID NO: 5217 - RNA, 20 nt, synthetic construct
  source 1..20: mol_type = other RNA
tcctcgctcagcggcccggc

SEQ ID NO: 5218 - RNA, 20 nt, synthetic construct
  source 1..20: mol_type = other RNA
ggccgccgcccgctccttct

SEQ ID NO: 5219 - RNA, 20 nt, synthetic construct
  source 1..20: mol_type = other RNA
gaccgagaaggagcgggcgg

SEQ ID NO: 5220 - RNA, 20 nt, synthetic construct
  source 1..20: mol_type = other RNA
agaaggagcgggcggcggcc

SEQ ID NO: 5221 - RNA, 20 nt, synthetic construct
  source 1..20: mol_type = other RNA
gagaaggagcgggcggcggc

SEQ ID NO: 5222 - RNA, 20 nt, synthetic construct
  source 1..20: mol_type = other RNA
gaaggagcgggcggcggccg

SEQ ID NO: 5223 - RNA, 20 nt, synthetic construct
  source 1..20: mol_type = other RNA
accttcttgctgtataacca

SEQ ID NO: 5224 - RNA, 20 nt, synthetic construct
  source 1..20: mol_type = other RNA
tgcagcaagataccgagatg

SEQ ID NO: 5225 - RNA, 20 nt, synthetic construct
  source 1..20: mol_type = other RNA
atgactcatgaccgaaatga

SEQ ID NO: 5226 - RNA, 20 nt, synthetic construct
  source 1..20: mol_type = other RNA
gcaagataccgagatgaggt

SEQ ID NO: 5227 - RNA, 20 nt, synthetic construct
  source 1..20: mol_type = other RNA
agaacattccatattacctg

SEQ ID NO: 5228 - RNA, 20 nt, synthetic construct
  source 1..20: mol_type = other RNA
taattctgtaggcgtgcatg

SEQ ID NO: 5229 - RNA, 20 nt, synthetic construct
  source 1..20: mol_type = other RNA
aatcttcacaaatttgtgct

SEQ ID NO: 5230 - RNA, 20 nt, synthetic construct
  source 1..20: mol_type = other RNA
gaggttaagaacagatgctg

SEQ ID NO: 5231 - RNA, 20 nt, synthetic construct
  source 1..20: mol_type = other RNA
aatttagatacccaccctcc

SEQ ID NO: 5232 - RNA, 20 nt, synthetic construct
  source 1..20: mol_type = other RNA
acactcttggcttacctccg

SEQ ID NO: 5233 - RNA, 20 nt, synthetic construct
  source 1..20: mol_type = other RNA
gccaagagtgttcggcacat

SEQ ID NO: 5234 - RNA, 20 nt, synthetic construct
  source 1..20: mol_type = other RNA
ttaagactgatgcagccggg

SEQ ID NO: 5235 - RNA, 20 nt, synthetic construct
  source 1..20: mol_type = other RNA
ttacctccgaggatcacaga

SEQ ID NO: 5236 - RNA, 20 nt, synthetic construct
  source 1..20: mol_type = other RNA
tggtgactggcttattgctc

SEQ ID NO: 5237 - RNA, 20 nt, synthetic construct
  source 1..20: mol_type = other RNA
ttaccttattgcatatgtag

SEQ ID NO: 5238 - RNA, 20 nt, synthetic construct
  source 1..20: mol_type = other RNA
agagaccacccacctcatct

SEQ ID NO: 5239 - RNA, 20 nt, synthetic construct
  source 1..20: mol_type = other RNA
agcaagataccgagatgagg

SEQ ID NO: 5240 - RNA, 20 nt, synthetic construct
  source 1..20: mol_type = other RNA
ccttcttgctgtataaccaa

SEQ ID NO: 5241 - RNA, 20 nt, synthetic construct
  source 1..20: mol_type = other RNA
agatgtcatggaaatccgaa

SEQ ID NO: 5242 - RNA, 20 nt, synthetic construct
  source 1..20: mol_type = other RNA
atgtagaggctgtgatcatg

SEQ ID NO: 5243 - RNA, 20 nt, synthetic construct
  source 1..20: mol_type = other RNA
aaagactttacaggtatatc

SEQ ID NO: 5244 - RNA, 20 nt, synthetic construct
  source 1..20: mol_type = other RNA
ctacctccaccagatgttgg

SEQ ID NO: 5245 - RNA, 20 nt, synthetic construct
  source 1..20: mol_type = other RNA
tacttacccccaacatctgg

SEQ ID NO: 5246 - RNA, 20 nt, synthetic construct
  source 1..20: mol_type = other RNA
actacctccaccagatgttg

SEQ ID NO: 5247 - RNA, 20 nt, synthetic construct
  source 1..20: mol_type = other RNA
tcatccatttaccctcacaa

SEQ ID NO: 5248 - RNA, 21 nt, synthetic construct
  source 1..21: mol_type = other RNA
taagccaagagtgttcggcac

SEQ ID NO: 5249 - RNA, 21 nt, synthetic construct
  source 1..21: mol_type = other RNA
gcagcaagataccgagatgag

SEQ ID NO: 5250 - RNA, 21 nt, synthetic construct
  source 1..21: mol_type = other RNA
ggttaagactgatgcagccgg

SEQ ID NO: 5251 - RNA, 21 nt, synthetic construct
  source 1..21: mol_type = other RNA
ccagtcaccatcatttcggtc

SEQ ID NO: 5252 - RNA, 21 nt, synthetic construct
  source 1..21: mol_type = other RNA
gagtgttcggcacatgggtaa

SEQ ID NO: 5253 - RNA, 21 nt, synthetic construct
  source 1..21: mol_type = other RNA
gaacactcttggcttacctcc

SEQ ID NO: 5254 - RNA, 21 nt, synthetic construct
  source 1..21: mol_type = other RNA
tcttgctgtataaccaagggc

SEQ ID NO: 5255 - RNA, 21 nt, synthetic construct
  source 1..21: mol_type = other RNA
tgaatgcagcaagataccgag

SEQ ID NO: 5256 - RNA, 21 nt, synthetic construct
  source 1..21: mol_type = other RNA
gggcagccacatgcacgccta

SEQ ID NO: 5257 - RNA, 21 nt, synthetic construct
  source 1..21: mol_type = other RNA
tgcagatacactgggacaatg

SEQ ID NO: 5258 - RNA, 21 nt, synthetic construct
  source 1..21: mol_type = other RNA
gtgaatgccctcaacttctca

SEQ ID NO: 5259 - RNA, 21 nt, synthetic construct
  source 1..21: mol_type = other RNA
agtcttaaccgaaccagctct

SEQ ID NO: 5260 - RNA, 21 nt, synthetic construct
  source 1..21: mol_type = other RNA
tcccggctgcatcagtcttaa

SEQ ID NO: 5261 - RNA, 21 nt, synthetic construct
  source 1..21: mol_type = other RNA
tgtgatcctcggaggtaagcc

SEQ ID NO: 5262 - RNA, 21 nt, synthetic construct
  source 1..21: mol_type = other RNA
tgaactgaatgcagcaagata

SEQ ID NO: 5263 - RNA, 21 nt, synthetic construct
  source 1..21: mol_type = other RNA
tgctgctgacgttgcatgttt

SEQ ID NO: 5264 - RNA, 21 nt, synthetic construct
  source 1..21: mol_type = other RNA
aagaagaggttatgagtatac

SEQ ID NO: 5265 - RNA, 21 nt, synthetic construct
  source 1..21: mol_type = other RNA
tcactacctccaccagatgtt

SEQ ID NO: 5266 - RNA, 21 nt, synthetic construct
  source 1..21: mol_type = other RNA
gatggtgactggcttattgct

SEQ ID NO: 5267 - RNA, 21 nt, synthetic construct
  source 1..21: mol_type = other RNA
tctgcttagacacaatcctag

SEQ ID NO: 5268 - RNA, 21 nt, synthetic construct
  source 1..21: mol_type = other RNA
taggttccaagcaggagaacc

SEQ ID NO: 5269 - RNA, 21 nt, synthetic construct
  source 1..21: mol_type = other RNA
tcggttaagactgatgcagcc

SEQ ID NO: 5270 - RNA, 21 nt, synthetic construct
  source 1..21: mol_type = other RNA
atatgtagaggctgtgatcat

SEQ ID NO: 5271 - RNA, 21 nt, synthetic construct
  source 1..21: mol_type = other RNA
tggggttcatcttaaaatagt

SEQ ID NO: 5272 - RNA, 21 nt, synthetic construct
  source 1..21: mol_type = other RNA
acaaatcttcacaaatttgtg

SEQ ID NO: 5273 - RNA, 23 nt, synthetic construct
  source 1..23: mol_type = other RNA
cccatgtgccgaacactcttggc

SEQ ID NO: 5274 - RNA, 23 nt, synthetic construct
  source 1..23: mol_type = other RNA
ggttccaagcaggagaaccagga

SEQ ID NO: 5275 - RNA, 23 nt, synthetic construct
  source 1..23: mol_type = other RNA
caggtatatccggagcaataagc

SEQ ID NO: 5276 - RNA, 23 nt, synthetic construct
  source 1..23: mol_type = other RNA
gatacccaccctcccggctgcat

SEQ ID NO: 5277 - RNA, 23 nt, synthetic construct
  source 1..23: mol_type = other RNA
tcaggatcctagaaaacttctct

SEQ ID NO: 5278 - RNA, 23 nt, synthetic construct
  source 1..23: mol_type = other RNA
gtatattactctacattgtccca

SEQ ID NO: 5279 - RNA, 23 nt, synthetic construct
  source 1..23: mol_type = other RNA
gtgtccaactgaaaccaaagcaa

SEQ ID NO: 5280 - RNA, 23 nt, synthetic construct
  source 1..23: mol_type = other RNA
aaaaccggcagagtttacccagc

SEQ ID NO: 5281 - RNA, 23 nt, synthetic construct
  source 1..23: mol_type = other RNA
gagggctgctgaagtatcaaact

SEQ ID NO: 5282 - RNA, 23 nt, synthetic construct
  source 1..23: mol_type = other RNA
ggtcatgagtcatccctcagatg

SEQ ID NO: 5283 - RNA, 23 nt, synthetic construct
  source 1..23: mol_type = other RNA
tggaaaaccttcttgctgtataa

SEQ ID NO: 5284 - RNA, 23 nt, synthetic construct
  source 1..23: mol_type = other RNA
tcacctgagaaaatacagatagt

SEQ ID NO: 5285 - RNA, 23 nt, synthetic construct
  source 1..23: mol_type = other RNA
ggcacagtacaggcacaaaggtc

SEQ ID NO: 5286 - RNA, 23 nt, synthetic construct
  source 1..23: mol_type = other RNA
tatggaagagcccagattccaag

SEQ ID NO: 5287 - RNA, 23 nt, synthetic construct
  source 1..23: mol_type = other RNA
catgacatctgagggatgactca

SEQ ID NO: 5288 - RNA, 23 nt, synthetic construct
  source 1..23: mol_type = other RNA
taactatgatatcttctggtata

SEQ ID NO: 5289 - RNA, 23 nt, synthetic construct
  source 1..23: mol_type = other RNA
taatgcagatacactgggacaat

SEQ ID NO: 5290 - RNA, 23 nt, synthetic construct
  source 1..23: mol_type = other RNA
tccaacaatctcctggttctcct

SEQ ID NO: 5291 - RNA, 23 nt, synthetic construct
  source 1..23: mol_type = other RNA
cagagtttctaactatgatatct

SEQ ID NO: 5292 - RNA, 23 nt, synthetic construct
  source 1..23: mol_type = other RNA
cccagcacaaatttgtgaagatt

SEQ ID NO: 5293 - RNA, 23 nt, synthetic construct
  source 1..23: mol_type = other RNA
cttaccagagtatttctcagaac

SEQ ID NO: 5294 - RNA, 23 nt, synthetic construct
  source 1..23: mol_type = other RNA
tagttcctggcctgacaggggtc

SEQ ID NO: 5295 - RNA, 23 nt, synthetic construct
  source 1..23: mol_type = other RNA
gggttcatcttaaaatagtagga

SEQ ID NO: 5296 - RNA, 23 nt, synthetic construct
  source 1..23: mol_type = other RNA
ttgaactgaatgcagcaagatac

SEQ ID NO: 5297 - RNA, 23 nt, synthetic construct
  source 1..23: mol_type = other RNA
atatcttgtggctttctcacctg

SEQ ID NO: 5298 - RNA, 23 nt, synthetic construct
  source 1..23: mol_type = other RNA
atattacctgtggtgttactatc

SEQ ID NO: 5299 - RNA, 23 nt, synthetic construct
  source 1..23: mol_type = other RNA
ggttccaagcaggagaaccagga

SEQ ID NO: 5300 - RNA, 23 nt, synthetic construct
  source 1..23: mol_type = other RNA
gatacccaccctcccggctgcat

SEQ ID NO: 5301 - RNA, 23 nt, synthetic construct
  source 1..23: mol_type = other RNA
tccaacaatctcctggttctcct

SEQ ID NO: 5302 - RNA, 23 nt, synthetic construct
  source 1..23: mol_type = other RNA
tagttcctggcctgacaggggtc

SEQ ID NO: 5303 - RNA, 23 nt, synthetic construct
  source 1..23: mol_type = other RNA
caggtatatccggagcaataagc

SEQ ID NO: 5304 - RNA, 23 nt, synthetic construct
  source 1..23: mol_type = other RNA
actgtaattcactgagaagttga

SEQ ID NO: 5305 - RNA, 23 nt, synthetic construct
  source 1..23: mol_type = other RNA
cagagtttctaactatgatatct

SEQ ID NO: 5306 - RNA, 23 nt, synthetic construct
  source 1..23: mol_type = other RNA
tgagtataccagaagatatcata

SEQ ID NO: 5307 - RNA, 23 nt, synthetic construct
  source 1..23: mol_type = other RNA
cccatgtgccgaacactcttggc

SEQ ID NO: 5308 - RNA, 23 nt, synthetic construct
  source 1..23: mol_type = other RNA
atgacatctgagggatgactcat

SEQ ID NO: 5309 - RNA, 23 nt, synthetic construct
  source 1..23: mol_type = other RNA
accttacttacccccaacatctg

SEQ ID NO: 5310 - RNA, 23 nt, synthetic construct
  source 1..23: mol_type = other RNA
tcagtgaattacagtgaagactt

SEQ ID NO: 5311 - RNA, 23 nt, synthetic construct
  source 1..23: mol_type = other RNA
taaacttaccctgaaacatgcaa

SEQ ID NO: 5312 - RNA, 23 nt, synthetic construct
  source 1..23: mol_type = other RNA
ccctgaaacatgcaacgtcagca

SEQ ID NO: 5313 - RNA, 23 nt, synthetic construct
  source 1..23: mol_type = other RNA
caaaaccggcagagtttacccag

SEQ ID NO: 5314 - RNA, 23 nt, synthetic construct
  source 1..23: mol_type = other RNA
acctcaactgcagccttatcctt

SEQ ID NO: 5315 - RNA, 23 nt, synthetic construct
  source 1..23: mol_type = other RNA
ggtcatgagtcatccctcagatg

SEQ ID NO: 5316 - RNA, 23 nt, synthetic construct
  source 1..23: mol_type = other RNA
tgagagctggttcggttaagact

SEQ ID NO: 5317 - RNA, 23 nt, synthetic construct
  source 1..23: mol_type = other RNA
accgaaccagctctcagaatatt

SEQ ID NO: 5318 - RNA, 23 nt, synthetic construct
  source 1..23: mol_type = other RNA
tgcagagtttctaactatgatat

SEQ ID NO: 5319 - RNA, 23 nt, synthetic construct
  source 1..23: mol_type = other RNA
tcatgatcacagcctctacatat

SEQ ID NO: 5320 - RNA, 23 nt, synthetic construct
  source 1..23: mol_type = other RNA
cttaccagagtatttctcagaac

SEQ ID NO: 5321 - RNA, 23 nt, synthetic construct
  source 1..23: mol_type = other RNA
tagtgtccaactgaaaccaaagc

SEQ ID NO: 5322 - RNA, 23 nt, synthetic construct
  source 1..23: mol_type = other RNA
tggtatactcataacctcttctt

SEQ ID NO: 5323 - RNA, 20 nt, synthetic construct
  source 1..20: mol_type = other RNA
ccccagctcctccatctctg

SEQ ID NO: 5324 - RNA, 20 nt, synthetic construct
  source 1..20: mol_type = other RNA
gcgtctggggctgcgcagcc

SEQ ID NO: 5325 - RNA, 20 nt, synthetic construct
  source 1..20: mol_type = other RNA
cagcctcctgcgcagctacg

SEQ ID NO: 5326 - RNA, 20 nt, synthetic construct
  source 1..20: mol_type = other RNA
aggcgggggcggggcgcaga

SEQ ID NO: 5327 - RNA, 20 nt, synthetic construct
  source 1..20: mol_type = other RNA
cggtgcccagcagggactcc

SEQ ID NO: 5328 - RNA, 20 nt, synthetic construct
  source 1..20: mol_type = other RNA
ggactccggggaggaagccg

SEQ ID NO: 5329 - RNA, 20 nt, synthetic construct
  source 1..20: mol_type = other RNA
gcactggggggtcctggagg

SEQ ID NO: 5330 - RNA, 20 nt, synthetic construct
  source 1..20: mol_type = other RNA
caacgccgaggtcctgggcg

SEQ ID NO: 5331 - RNA, 20 nt, synthetic construct
  source 1..20: mol_type = other RNA
ggcccaccccctgagccacc

SEQ ID NO: 5332 - RNA, 20 nt, synthetic construct
  source 1..20: mol_type = other RNA
ccaccaggagggctctgcca

SEQ ID NO: 5333 - RNA, 20 nt, synthetic construct
  source 1..20: mol_type = other RNA
tggcttcaggggcagggaga

SEQ ID NO: 5334 - RNA, 20 nt, synthetic construct
  source 1..20: mol_type = other RNA
tgtccattcgagaaatcttc

SEQ ID NO: 5335 - RNA, 20 nt, synthetic construct
  source 1..20: mol_type = other RNA
acccccgaagggctgggaga

SEQ ID NO: 5336 - RNA, 20 nt, synthetic construct
  source 1..20: mol_type = other RNA
ttcctccccggagtccctgc

SEQ ID NO: 5337 - RNA, 20 nt, synthetic construct
  source 1..20: mol_type = other RNA
ggggtcctggagggggcgct

SEQ ID NO: 5338 - RNA, 20 nt, synthetic construct
  source 1..20: mol_type = other RNA
cgcactggggggtcctggag

SEQ ID NO: 5339 - RNA, 20 nt, synthetic construct
  source 1..20: mol_type = other RNA
tgcgctgcgccaggccgaac

SEQ ID NO: 5340 - RNA, 20 nt, synthetic construct
  source 1..20: mol_type = other RNA
cctcaccaaccacctgcacc

SEQ ID NO: 5341 - RNA, 20 nt, synthetic construct
  source 1..20: mol_type = other RNA
aggtgcagacccagctctgc

SEQ ID NO: 5342 - RNA, 20 nt, synthetic construct
  source 1..20: mol_type = other RNA
agcccgaagccctgagtgcc

SEQ ID NO: 5343 - RNA, 20 nt, synthetic construct
  source 1..20: mol_type = other RNA
tgagtgcctggatctgctgg

SEQ ID NO: 5344 - RNA, 20 nt, synthetic construct
  source 1..20: mol_type = other RNA
gggaaacacacccctgcacc

SEQ ID NO: 5345 - RNA, 20 nt, synthetic construct
  source 1..20: mol_type = other RNA
agaaggaggcgggtgagggt

SEQ ID NO: 5346 - RNA, 20 nt, synthetic construct
  source 1..20: mol_type = other RNA
ctatcagaggtagggggtga

SEQ ID NO: 5347 - RNA, 20 nt, synthetic construct
  source 1..20: mol_type = other RNA
ctcacctgctgggctgggcg

SEQ ID NO: 5348 - RNA, 20 nt, synthetic construct
  source 1..20: mol_type = other RNA
ggcagagctggcagagcgtc

SEQ ID NO: 5349 - RNA, 20 nt, synthetic construct
  source 1..20: mol_type = other RNA
cgggagccagtcagtggagc

SEQ ID NO: 5350 - RNA, 20 nt, synthetic construct
  source 1..20: mol_type = other RNA
agccaagatcgaggtggacc

SEQ ID NO: 5351 - RNA, 20 nt, synthetic construct
  source 1..20: mol_type = other RNA
cgctgcacctcttccttgtc

SEQ ID NO: 5352 - RNA, 20 nt, synthetic construct
  source 1..20: mol_type = other RNA
ggcactcagggcttcgggct

SEQ ID NO: 5353 - RNA, 20 nt, synthetic construct
  source 1..20: mol_type = other RNA
ggtggacagtggggctgaag

SEQ ID NO: 5354 - RNA, 20 nt, synthetic construct
  source 1..20: mol_type = other RNA
ctgcttcgggtgtccttctc

SEQ ID NO: 5355 - RNA, 20 nt, synthetic construct
  source 1..20: mol_type = other RNA
ctgctgggctgggcggggtc

SEQ ID NO: 5356 - RNA, 20 nt, synthetic construct
  source 1..20: mol_type = other RNA
gagccagtcagtggagcagg

SEQ ID NO: 5357 - RNA, 20 nt, synthetic construct
  source 1..20: mol_type = other RNA
agccctcctggtggctcagg

SEQ ID NO: 5358 - RNA, 20 nt, synthetic construct
  source 1..20: mol_type = other RNA
cagagccctcctggtggctc

SEQ ID NO: 5359 - RNA, 20 nt, synthetic construct
  source 1..20: mol_type = other RNA
ggtcagtgcacctgaggctg

SEQ ID NO: 5360 - RNA, 20 nt, synthetic construct
  source 1..20: mol_type = other RNA
tgtttctggggctggctcct

SEQ ID NO: 5361 - RNA, 20 nt, synthetic construct
  source 1..20: mol_type = other RNA
ctctaggccccagggcctta

SEQ ID NO: 5362 - RNA, 20 nt, synthetic construct
  source 1..20: mol_type = other RNA
catcaccttcttcagttctt

SEQ ID NO: 5363 - RNA, 20 nt, synthetic construct
  source 1..20: mol_type = other RNA
gaggctctgggggtgcagcc

SEQ ID NO: 5364 - RNA, 20 nt, synthetic construct
  source 1..20: mol_type = other RNA
gggggtgcagccgggggcta

SEQ ID NO: 5365 - RNA, 20 nt, synthetic construct
  source 1..20: mol_type = other RNA
atccaggcactcagggcttc

SEQ ID NO: 5366 - RNA, 20 nt, synthetic construct
  source 1..20: mol_type = other RNA
gccacagagatggaggagct

SEQ ID NO: 5367 - RNA, 20 nt, synthetic construct
  source 1..20: mol_type = other RNA
gaggtagggggtgaaggcag

SEQ ID NO: 5368 - RNA, 20 nt, synthetic construct
  source 1..20: mol_type = other RNA
gggctgggcggggtcagggg

SEQ ID NO: 5369 - RNA, 20 nt, synthetic construct
  source 1..20: mol_type = other RNA
caggtcagtgcacctgaggc

SEQ ID NO: 5370 - RNA, 20 nt, synthetic construct
  source 1..20: mol_type = other RNA
tgactaagaagaacatgatg

SEQ ID NO: 5371 - RNA, 20 nt, synthetic construct
  source 1..20: mol_type = other RNA
agatgactggcttcaggggc

SEQ ID NO: 5372 - RNA, 20 nt, synthetic construct
  source 1..20: mol_type = other RNA
aggctctgggggtgcagccg

SEQ ID NO: 5373 - RNA, 20 nt, synthetic construct
  source 1..20: mol_type = other RNA
cctgcacctggcagctggac

SEQ ID NO: 5374 - RNA, 20 nt, synthetic construct
  source 1..20: mol_type = other RNA
ggggtgaaggcagtgggcac

SEQ ID NO: 5375 - RNA, 20 nt, synthetic construct
  source 1..20: mol_type = other RNA
tgctgggctgggcggggtca

SEQ ID NO: 5376 - RNA, 20 nt, synthetic construct
  source 1..20: mol_type = other RNA
aggaagaggtgcagcggaag

SEQ ID NO: 5377 - RNA, 20 nt, synthetic construct
  source 1..20: mol_type = other RNA
tcccacatgggtggaggctc

SEQ ID NO: 5378 - RNA, 20 nt, synthetic construct
  source 1..20: mol_type = other RNA
ccagtccagctgccaggtgc

SEQ ID NO: 5379 - RNA, 20 nt, synthetic construct
  source 1..20: mol_type = other RNA
tgtggccccggaagctgctt

SEQ ID NO: 5380 - RNA, 20 nt, synthetic construct
  source 1..20: mol_type = other RNA
gcccagctgccctgggcttc

SEQ ID NO: 5381 - RNA, 20 nt, synthetic construct
  source 1..20: mol_type = other RNA
tacaaaaacttcagaggcag

SEQ ID NO: 5382 - RNA, 20 nt, synthetic construct
  source 1..20: mol_type = other RNA
gctgggagatgactggcttc

SEQ ID NO: 5383 - RNA, 20 nt, synthetic construct
  source 1..20: mol_type = other RNA
tgtggtgagctttctgctgc

SEQ ID NO: 5384 - RNA, 20 nt, synthetic construct
  source 1..20: mol_type = other RNA
gctggggttggtcacccatc

SEQ ID NO: 5385 - RNA, 20 nt, synthetic construct
  source 1..20: mol_type = other RNA
gcccgtctagcagctgctcc

SEQ ID NO: 5386 - RNA, 20 nt, synthetic construct
  source 1..20: mol_type = other RNA
caaagaactgaagaaggtga

SEQ ID NO: 5387 - RNA, 20 nt, synthetic construct
  source 1..20: mol_type = other RNA
cccaccttctcccagccctt

SEQ ID NO: 5388 - RNA, 20 nt, synthetic construct
  source 1..20: mol_type = other RNA
ccaccttctcccagcccttc

SEQ ID NO: 5389 - RNA, 20 nt, synthetic construct
  source 1..20: mol_type = other RNA
gccgggggctacggaggagc

SEQ ID NO: 5390 - RNA, 20 nt, synthetic construct
  source 1..20: mol_type = other RNA
agtccagctgccaggtgcag

SEQ ID NO: 5391 - RNA, 20 nt, synthetic construct
  source 1..20: mol_type = other RNA
ggagggagtgaggctgctga

SEQ ID NO: 5392 - RNA, 20 nt, synthetic construct
  source 1..20: mol_type = other RNA
ctcctggtggctcagggggt

SEQ ID NO: 5393 - RNA, 20 nt, synthetic construct
  source 1..20: mol_type = other RNA
ccacgggcacccccagcctc

SEQ ID NO: 5394 - RNA, 20 nt, synthetic construct
  source 1..20: mol_type = other RNA
aggtcagtgcacctgaggct

SEQ ID NO: 5395 - RNA, 20 nt, synthetic construct
  source 1..20: mol_type = other RNA
gggggctacggaggagctgg

SEQ ID NO: 5396 - RNA, 20 nt, synthetic construct
  source 1..20: mol_type = other RNA
agagatggaggagctggggt

SEQ ID NO: 5397 - RNA, 20 nt, synthetic construct
  source 1..20: mol_type = other RNA
acacccctgcacctggcagc

SEQ ID NO: 5398 - RNA, 20 nt, synthetic construct
  source 1..20: mol_type = other RNA
cctcctggtggctcaggggg

SEQ ID NO: 5399 - RNA, 20 nt, synthetic construct
  source 1..20: mol_type = other RNA
ggaggctctgggggtgcagc

SEQ ID NO: 5400 - RNA, 20 nt, synthetic construct
  source 1..20: mol_type = other RNA
ggggctgtaggccagggagg

SEQ ID NO: 5401 - RNA, 20 nt, synthetic construct
  source 1..20: mol_type = other RNA
gctgcgcaggaggctgccac

SEQ ID NO: 5402 - RNA, 20 nt, synthetic construct
  source 1..20: mol_type = other RNA
ggctacggaggagctggagg

SEQ ID NO: 5403 - RNA, 20 nt, synthetic construct
  source 1..20: mol_type = other RNA
gtgatcaccgccaggtgcag

SEQ ID NO: 5404 - RNA, 20 nt, synthetic construct
  source 1..20: mol_type = other RNA
gggctgggagaaggtgggca

SEQ ID NO: 5405 - RNA, 20 nt, synthetic construct
  source 1..20: mol_type = other RNA
ggccagaagcccagggcagc

SEQ ID NO: 5406 - RNA, 20 nt, synthetic construct
  source 1..20: mol_type = other RNA
gcagcctcactccctcctct

SEQ ID NO: 5407 - RNA, 20 nt, synthetic construct
  source 1..20: mol_type = other RNA
aggagggagtgaggctgctg

SEQ ID NO: 5408 - RNA, 20 nt, synthetic construct
  source 1..20: mol_type = other RNA
ccctgagtgcctggatctgc

SEQ ID NO: 5409 - RNA, 20 nt, synthetic construct
  source 1..20: mol_type = other RNA
agccacagagatggaggagc

SEQ ID NO: 5410 - RNA, 20 nt, synthetic construct
  source 1..20: mol_type = other RNA
agaggccgagcagcgggagc
